(19) United States
(12) Patent Application Publication
(10) Pub. No.: US 2024/0271144 A1
(43) Pub. Date: Aug. 15, 2024

(54) SODIUM-GLUCOSE COTRANSPORTER-2 (SGLT2) IRNA COMPOSITIONS AND METHODS OF USE THEREOF

(71) Applicant: Alnylam Pharmaceuticals, Inc., Cambridge, MA (US)

(72) Inventors: Ho-Chou Tu, Boston, MA (US); Aimee M. Deaton, Somerville, MA (US); Jeffrey Zuber, Somerville, MA (US); Patrick Haslett, Somerville, MA (US); Kevin Fitzgerald, Brookline, MA (US)

(21) Appl. No.: 18/389,245

(22) Filed: Nov. 14, 2023

Related U.S. Application Data
(63) Continuation of application No. PCT/US2022/028489, filed on May 10, 2022.
(60) Provisional application No. 63/320,278, filed on Mar. 16, 2022.
(60) Provisional application No. 63/189,760, filed on May 18, 2021.

(51) Int. Cl. C12N 15/113

(52) U.S. Cl. CPC C12N 15/1138; C12N 2310/14; C12N 2310/315; C12N 2310/321; C12N 2310/322; C12N 2310/351; C12N 2310/3515

(57) ABSTRACT

The present invention relates to RNAi agents, e.g., dsRNA agents, targeting the Sodium-glucose cotransporter-2 (SGLT2) gene. The invention also relates to methods of using such RNAi agents to inhibit expression of a SGLT2 gene and to methods of treating or preventing a SGLT2-associated disease, such as gout or diabetes, in a subject.

### RELATED APPLICATIONS

[0001] This application is a 35 § U.S.C. 111(a) continuation application which claims the benefit of priority to PCT/US2022/028489, filed on May 10, 2022, which, in turn, claims the benefit of priority to U.S. Provisional Application No. 63/189.760, filed on May 18, 2021, and U.S. Provisional Application No. 63/320,278, filed on Mar. 16, 2022. The entire contents of each of the foregoing applications are incorporated herein by reference.

### SEQUENCE LISTING

[0002] The instant application contains a Sequence Listing which has been submitted electronically in XML format and is hereby incorporated by reference in its entirety. Said XML copy, created on Feb. 20, 2024, is named 121301_15803_SL.xml and is 4,482,005 bytes in size. The sequence listing is part of the specification and is incorporated in its entirety by reference herein.

### BACKGROUND OF THE INVENTION

[0003] Diabetes is a group of metabolic diseases characterized by high blood sugar levels which result from defects in insulin secretion or action, or both. There are two most common types of diabetes, namely type 1 diabetes and type 2 diabetes, which both result from the body's inability to regulate insulin, a hormone released by the pancreas in response to increased levels of blood sugar (glucose) in the blood.

[0004] Type I diabetes occurs when the pancreas produces too little insulin to regulate blood sugar levels appropriately. In contrast, in type II diabetes, the pancreas continues to manufacture insulin. However, the body responds poorly to insulin and develops resistance to its effects, therefore resulting in too much sugar circulating in the bloodstream. Type II diabetes has become an increasingly prevalent metabolic disease that due to a high frequency of complications leads to a significant reduction of life expectancy. Type II diabetes is currently the most frequent cause of adult-onset loss of vision, renal failure, and amputations in the industrialized world. In addition, the presence of type II diabetes is associated with a two to five fold increase in cardiovascular disease risk.

[0005] Hyperinsulinemia or insulin resistance in diabetes is also associated with reduced renal clearance of uric acid (also referred to herein as urate) and elevated serum uric acid levels. Chronic elevated serum uric acid (chronic hyperuricemia), typically defined as serum urate levels greater than 6.8 mg/dl (greater than 360 mmol/), the level above which the physiological saturation threshold is exceeded (Mandell, Cleve. Clin. Med. 75:S5-S8, 2008), can lead to a number of different diseases. For example, gout is characterized by recurrent attacks of acute inflammatory arthritis that is caused by an inflammatory reaction to uric acid crystals in the joint typically due to insufficient renal clearance of uric acid or excessive uric acid production. Elevated uric acid is also associated with non-alcoholic steatohepatitis (NASH), non-alcoholic fatty liver disease (NAFLD), metabolic disorder, cardiovascular disease, and conditions linked to oxidative stress, chronic low grade inflammation, and insulin resistance (Xu et al., J. Hepatol. 62:1412-1419, 2015; Cardoso et al., J. Pediatr. 89:412-418, 2013; Sertoglu et al., Clin. Biochem., 47:383-388, 2014).

[0006] Plasma glucose is normally maintained in a relatively narrow range and this requires a delicate balance between glucose production (liver and kidney), intestinal absorption, renal reabsorption, and glucose utilization in tissues around the body. Reabsorption of glucose across epithelial cells of the kidney depend on a class of sodium-dependent glucose cotransporters (SGLTs) located in the brush-border membranes in the tubuli along the sodium gradient. There are at least 3 SGLT isoforms that differ in their expression pattern as well as in their physico-chemical properties.

[0007] One of these cotransporters, SGLT2, also known as solute carrier family 5 member 2 (SLC5A2), is expressed in the proximal convoluted tubule of the kidneys. The SGLT2 transporter is the major cotransporter involved in glucose reabsorption in the kidney and is responsible for roughly 90% of filtered glucose reabsorption (Scheen AJ, Drugs. 2015 Jan; 75(1):33-59).

[0008] SGLT2 inhibitors are known as a class of drugs that address Type 2 diabetes or hyperglycemia. SGLT2 inhibtors prevent the renal reabsorption of glucose, therefore facilitating glucose excretion in the urine and consequentially reducing serum glucose levels. SGLT2 inhibitors are also effective in lowering serum uric acid levels. However, SGLT2 inhibitors can also cause side effects including diabetic ketoacidosis, and blood and kidney infections.

[0009] Accordingly, there exists an unmet need for effective treatments for diabetes and related diseases, e.g., gout, such as an agent that can selectively and efficiently silence the SGLT2 gene using the cell's own RNAi machinery that has both high biological activity and in vivo stability, and that can effectively inhibit expression of a target SGLT2 gene.

### BRIEF SUMMARY OF THE INVENTION

[0010] The present disclosure provides RNAi agent compositions which effect the RNA-induced silencing complex (RISC)-mediated cleavage of RNA transcipts of a gene encoding sodium-glucose cotransporter-2 (SGLT2). The SGLT2 gene may be within a cell, e.g., a cell within a subject, such as a human. The present disclosure also provides methods of using the RNAi agent compositions of the disclosure for inhibiting the expression of a SGLT2 gene or for treating a subject who would benefit from inhibiting or reducing the expression of a SGLT2 gene, e.g., a subject having a SGLT2-associated disorder, e.g., a subject having gout or diabetes, e.g., type II diabetes, or a subject at risk of developing gout or diabetes.

[0011] Accordingly, in one aspect, the invention provides a double stranded ribonucleic acid (dsRNA) agent for inhibiting expression of sodium-glucose cotransporter-2 (SGLT2) in a cell, wherein the dsRNA agent comprises a sense strand and an antisense strand forming a double stranded region, wherein the sense strand comprises at least 15, e.g., 15, 16, 17, 18, 19, or 20, contiguous nucleotides differing by no more than 0, 1, 2, or 3 nucleotides from the nucleotide sequence of SEQ ID NO:1, and said antisense strand comprises at least 15, e.g., 15, 16, 17, 18, 19, or 20, contiguous nucleotides differing by no more than 0, 1, 2 or 3 nucleotides from the nucleotide sequence of SEQ ID NO: 6, and wherein the sense strand or the antisense strand is conjugated to one or more lipophilic moieties.

[0012] In another aspect, the present invention provides a double stranded ribonucleic acid (dsRNA) agent for inhibiting expression of sodium-glucose cotransporter-2 (SGLT2) in a cell, wherein the dsRNA agent comprises a sense strand and an antisense strand forming a double stranded region, wherein the antisense strand comprises a region of complementarity to an mRNA encoding SGLT2, and wherein the region of complementarity comprises at least 15, e.g., 15, 16, 17, 18, 19, or 20, contiguous nucleotides differing by no more than 0, 1, 2 or 3 nucleotides from any one of the antisense nucleotide sequences in any one of Tables 2-3, and wherein the sense strand or the antisense strand is conjugated to one or more lipophilic moieties.

[0013] In one embodiment, both the sense strand and the antisense strand are conjugated to one or more lipophilic moieties.

[0014] In one embodiment, the lipophilicity of the lipophilic moiety, measured by log Kow, exceeds 0.

[0015] In one embodiment, the hydrophobicity of the double-stranded RNAi agent, measured by the unbound fraction in a plasma protein binding assay of the double-stranded RNAi agent, exceeds 0.2.

[0016] In one embodiment, the plasma protein binding assay is an electrophoretic mobility shift assay using human serum albumin protein.

[0017] In one embodiment, the dsRNA agent comprises at least one modified nucleotide.

[0018] In some embodiments, substantially all of the nucleotides of the antisense strand are modified nucleotides.

[0019] In another embodiment, all of the nucleotides of the sense strand and all of the nucleotides of the antisense strand comprise a modification.

[0020] In one embodiment, at least one of the modified nucleotides is selected from the group a deoxy-nucleotide, a 3′-terminal deoxythimidine (dT) nucleotide, a 2′-O-methyl modified nucleotide, a 2′-fluoro modified nucleotide, a 2′-deoxy-modified nucleotide, a locked nucleotide, an unlocked nucleotide, a conformationally restricted nucleotide, a constrained ethyl nucleotide, an abasic nucleotide, a 2′-amino-modified nucleotide, a 2′-O-allyl-modified nucleotide, 2′-C-alkyl-modified nucleotide, a 2′-hydroxyl-modified nucleotide, a 2′-methoxyethyl modified nucleotide, a 2′-O-alkyl-modified nucleotide, a morpholino nucleotide, a phosphoramidate, a non-natural base comprising nucleotide, a tetrahydropyran modified nucleotide, a 1,5-anhydrohexitol modified nucleotide, a cyclohexenyl modified nucleotide, a nucleotide comprising a 5′-phosphorothioate group, a nucleotide comprising a 5′-methylphosphonate group, a nucleotide comprising a 5′ phosphate or 5′ phosphate mimic, a nucleotide comprising vinyl phosphonate, a nucleotide comprising adenosine-glycol nucleic acid (GNA), a nucleotide comprising thymidine-glycol nucleic acid (GNA) S-Isomer, a nucleotide comprising 2-hydroxymethyl-tetrahydrofurane-5-phosphate, a nucleotide comprising 2′-deoxythymidine-3′phosphate, a nucleotide comprising 2′-deoxyguanosine-3′-phosphate, a 2′-O hexadecyl nucleotide, a nucleotide comprising a 2′-phosphate, a cytidine-2-phosphate nucleotide, a guanosine-2-phosphate nucleotide, a 2′-O-hexadecyl-cytidine-3′-phosphate nucleotide, a 2′-O-hexadecyl-adenosine-3′-phosphate nucleotide, a 2′-O-hexadecyl-guanosine-3′-phosphate nucleotide, a 2′-O-hexadecyl-uridine-3′-phosphate nucleotide, a a 5′-vinyl phosphonate (VP), a 2′ -deoxyadenosine-3′-phosphate nucleotide, a 2-deoxycytidine-3-phosphate nucleotide, a 2-deoxyguanosine-3′-phosphate nucleotide, a 2′ -deoxythymidine-3′-phosphate nucleotide, a 2-deoxyuridine nucleotide, and a terminal nucleotide linked to a cholesteryl derivative and a dodecanoic acid bisdecylamide group; and combinations thereof.

[0021] In another embodiment, modified nucleotide is selected from the group consisting of a 2′-deoxy-2′-fluoro modified nucleotide, a 2′-deoxy-modified nucleotide, 3′-terminal deoxythimidine nucleotides (dT), a locked nucleotide, an abasic nucleotide, a 2′-amino-modified nucleotide, a 2′-alkyl-modified nucleotide, a 2′-O-methyl modified nucleotide, a nucleotide comprising glycol nucleic acid (GNA), a morpholino nucleotide, a phosphoramidate, and a non-natural base comprising nucleotide.

[0022] In another embodiment, the modified nucleotide comprises a short sequence of 3′-terminal deoxythimidine nucleotides (dT).

[0023] In yet another embodiment, the modifications on the nucleotides are 2′-O-methyl modifications, 2′-deoxy-modifications, 2′fluoro modifications, 5′-vinyl phosphonate (VP) modifications, and 2′-O hexadecyl nucleotide modifications.

[0024] In cetain embodiments, the double stranded RNAi agent does not include an inverted abasic nucleotide.

[0025] In one embodiment, the dsRNA agent further comprises at least one phosphorothioate internucleotide linkage.

[0026] In one embodiment, the dsRNA agent comprises 6-8 phosphorothioate internucleotide linkages.

[0027] In one embodiment, each strand is no more than 30 nucleotides in length.

[0028] In one embodiment, at least one strand comprises a 3′ overhang of at least 1 nucleotide.

[0029] In another embodiment, at least one strand comprises a 3′ overhang of at least 2 nucleotides.

[0030] The double stranded region may be 15-30 nucleotide pairs in length; 17-23 nucleotide pairs in length; 17-25 nucleotide pairs in length; 23-27 nucleotide pairs in length; 19-21 nucleotide pairs in length; or 21-23 nucleotide pairs in length.

[0031] Each strand of the dsRNA agent may be 15-30, 17-20, 19-30 nucleotides in length; 19-23 nucleotides in length; or 21-23 nucleotides in length, e.g., 15, 16, 17, 18, 19, 20, 21, 22, 23, 24, 25, 26, 27, 28, 29, or 30 nucleotides in length.

[0032] In certain embodiments, the double stranded RNAi agent further includes a lipophilic ligand, e.g., a C16 ligand, conjugated to the 3′ end of the sense strand through a monovalent or branched bivalent or trivalent linker.

[0033] In one embodiment, the ligand is conjugated at the 2′-position of a nucleotide or modified nucleotide within the sense or antisense strand. For example, a C16 ligand may be conjugated as shown in the following structure:

[chemical structure]

where * denotes a bond to an adjacent nucleotide and B is a nucleobase or a nucleobase analog, optionally where B is adenine, guanine, cytosine, thymine or uracil.

[0034] In other embodiments, the agent further comprises a targeting ligand that targets a liver tissue, e.g., one or more GalNAc derivatives, conjugated to the double stranded RNAi agent via a linker or carrier.

[0035] In yet other embodiments, the agents further comprise a lipophilic ligand, e.g., a C16 ligand, conjugated to the 3′ end of the sense strand through a monovalent or branched bivalent or trivalent linker and a targeting ligand that targets a liver tissue, e.g., one or more GalNAc derivatives conjugated to the 3′ end of the sense strand through a monovalent or branched bivalent or trivalent linker.

[0036] In one embodiment, one or more lipophilic moieties are conjugated to one or more internal positions on at least one strand.

[0037] In one embodiment, the one or more lipophilic moieties are conjugated to one or more internal positions on at least one strand via a linker or carrier.

[0038] In certain embodiments, the lipophilic moiety is not a cholesterol moiety.

[0039] In certain embodiments, the agent further comprises a targeting ligand that targets a liver tissue, e.g., one or more GalNAc derivatives, optionally conjugated to the double stranded RNAi agent via a linker or carrier.

[0040] In yet other embodiments, the agents further comprise one or more lipophilic moieties conjugated to one or more internal nucleotide positions, optionally via a linker or carrier and a targeting ligand that targets a liver tissue, e.g., one or more GalNAc derivatives, optionally conjugated to the double stranded RNAi agent via a linker or carrier.

[0041] In one embodiment, the internal positions include all positions except the terminal two positions from each end of the at least one strand.

[0042] In another embodiment, the internal positions include all positions except the terminal three positions from each end of the at least one strand.

[0043] In another embodiment, the internal positions exclude a cleavage site region of the sense strand.

[0044] In yet another embodiment, the internal positions include all positions except positions 9-12, counting from the 5′-end of the sense strand. In certain emodiments, the sense strand is 21 nucleotides in length.

[0045] In one embodiment, the internal positions include all positions except positions 11-13, counting from the 3′-end of the sense strand. Optionally, the internal positions exclude the cleavage site region of the antisense strand. In certain emodiments, the sense strand is 21 nucleotides in length.

[0046] In one embodiment, the internal positions exclude a cleavage site region of the antisense strand.

[0047] In one embodiment, the internal positions include all positions except positions 12-14, counting from the 5′-end of the antisense strand. In certain emodiments, the antisense strand is 23 nucleotides in length.

[0048] In one embodiment, the internal positions include all positions except positions 11-13 on the sense strand, counting from the 3′-end, and positions 12-14 on the antisense strand, counting from the 5′-end. In certain emodiments, the sense strand is 21 nucleotides in length and the antisense strand is 23 nucleotides in length.

[0049] In one embodiment, the one or more lipophilic moieties are conjugated to one or more of the internal positions selected from the group consisting of positions 4-8 and 13-18 on the sense strand, and positions 6-10 and 15-18 on the antisense strand, counting from the 5′end of each strand.

[0050] In one embodiment, the one or more lipophilic moieties are conjugated to one or more of the internal positions selected from the group consisting of positions 5, 6, 7, 15, and 17 on the sense strand, and positions 15 and 17 on the antisense strand, counting from the 5′-end of each strand. In certain emodiments, the sense strand is 21 nucleotides in length and the antisense strand is 23 nucleotides in length.

[0051] In one embodiment, the positions in the double stranded region exclude a cleavage site region of the sense strand.

[0052] In one embodiment, the sense strand is 21 nucleotides in length, the antisense strand is 23 nucleotides in length, and the lipophilic moiety is conjugated to position 21, position 20, position 15, position 1, position 7, position 6, or position 2 of the sense strand or position 16 of the antisense strand counting from the 5′end of each strand.

[0053] In one embodiment, the lipophilic moiety is conjugated to position 21, position 20, position 15, position 1, or position 7 of the sense strand counting from the 5′end of the strand.

[0054] In one embodiment, the lipophilic moiety is conjugated to position 21, position 20, or position 15 of the sense strand counting from the 5′end of the strand.

[0055] In one embodiment, the lipophilic moiety is conjugated to position 20 or position 15 of the sense strand counting from the 5′end of the strand.

[0056] In one embodiment, the lipophilic moiety is conjugated to position 16 of the antisense strand counting from the 5′end of the strand.

[0057] In one embodiment, the lipophilic moiety is an aliphatic, alicyclic, or polyalicyclic compound.

[0058] In one embodiment, the lipophilic moiety is selected from the group consisting of lipid, cholesterol, retinoic acid, cholic acid, adamantane acetic acid, 1-pyrene butyric acid, dihydrotestosterone, 1,3-bis-O(hexadecyl)glycerol, geranyloxyhexyanol, hexadecylglycerol, borneol, menthol, 1,3-propanediol, heptadecyl group, palmitic acid, myristic acid, O3-(oleoyl)lithocholic acid, O3-(oleoyl)cholenic acid, dimethoxytrityl, or phenoxazine. In certain embodiments, the lipophilic moiety is not cholesterol.

[0059] In one embodiment, the lipophilic moiety contains a saturated or unsaturated C4-C30 hydrocarbon chain, and an optional functional group selected from the group consisting of hydroxyl, amine, carboxylic acid, sulfonate, phosphate, thiol, azide, and alkyne.

[0060] In one embodiment, the lipophilic moiety contains a saturated or unsaturated C6-C18 hydrocarbon chain.

[0061] In one embodiment, the lipophilic moiety contains a saturated or unsaturated C16 hydrocarbon chain.

[0062] In one embodiment, the saturated or unsaturated C16 hydrocarbon chain is conjugated to position 6, counting from the 5′-end of the strand.

[0063] In one embodiment, the lipophilic moiety is conjugated via a carrier that replaces one or more nucleotide(s) in the internal position(s) or the double stranded region.

[0064] In one embodiment, the carrier is a cyclic group selected from the group consisting of pyrrolidinyl, pyrazolinyl, pyrazolidinyl, imidazolinyl, imidazolidinyl, piperidinyl, piperazinyl, [1,3]dioxolanyl, oxazolidinyl, isoxazolidinyl, morpholinyl, thiazolidinyl, isothiazolidinyl, quinoxalinyl, pyridazinonyl, tetrahydrofuranyl, and decalinyl; or is an acyclic moiety based on a serinol backbone or a diethanolamine backbone.

[0065] In one embodiment, the lipophilic moiety is conjugated to the double-stranded iRNA agent via a linker containing an ether, thioether, urea, carbonate, amine, amide, maleimide-thioether, disulfide, phosphodiester, sulfonamide linkage, a product of a click reaction, or carbamate.

[0066] In one embodiment, the lipophilic moiety is conjugated to a nucleobase, sugar moiety, or internucleosidic linkage.

[0067] In one embodiment, the double-stranded RNAi agent further includes a phosphate or phosphate mimic at the 5′-end of the antisense strand. Optionally, the phosphate mimic is a 5′-vinyl phosphonate (VP). When the phosphate mimic is a 5′-vinyl phosphonate (VP), the 5′-terminal nucleotide can have the following structure,

[chemical structure]

[0068] wherein * indicates the location of the bond to 5′-position of the adjacent nucleotide; R is hydrogen, hydroxy, methoxy, fluoro, or another 2′-modification described herein (e.g., hydroxy or methoxy); and B is a nucleobase or a modified nucleobase, optionally where B is adenine, guanine, cytosine, thymine or uracil.

[0069] In certain embodiments, the RNAi agent does not include an inverted abasic nucleotide.

[0070] In certain embodiments, the double-stranded RNAi agent does not include a targeting ligand.

[0071] In certain embodiments, the double-stranded RNAi agent further includes a targeting ligand that targets a receptor which mediates delivery to a liver tissue, e.g., a lipophilic ligand. In certain embodiments, the targeting ligand is a C16 ligand. In certain embodiments, the lipophilic ligand is not a cholesterol moiety.

[0072] In one embodiment, the lipophilic moiety or a targeting ligand is conjugated via a bio-clevable linker selected from the group consisting of DNA, RNA, disulfide, amide, funtionalized monosaccharides or oligosaccharides of galactosamine, glucosamine, glucose, galactose, mannose, and combinations thereof.

[0073] In one embodiment, the 3′ end of the sense strand is protected via an end cap which is a cyclic group having an amine, said cyclic group being selected from the group consisting of pyrrolidinyl, pyrazolinyl, pyrazolidinyl, imidazolinyl, imidazolidinyl, piperidinyl, piperazinyl, [1,3]dioxolanyl, oxazolidinyl, isoxazolidinyl, morpholinyl, thiazolidinyl, isothiazolidinyl, quinoxalinyl, pyridazinonyl, tetrahydrofuranyl, and decalinyl.

[0074] In one embodiment, the dsRNA agent further comprises a targeting ligand that targets a liver tissue.

[0075] In one embodiment, the targeting ligand is a GalNAc conjugate.

[0076] In one embodiment, the dsRNA agent further comprises a terminal, chiral modification occurring at the first internucleotide linkage at the 3′ end of the antisense strand, having the linkage phosphorus atom in Sp configuration, a terminal, chiral modification occurring at the first internucleotide linkage at the 5′ end of the antisense strand, having the linkage phosphorus atom in Rp configuration, and a terminal, chiral modification occurring at the first internucleotide linkage at the 5′ end of the sense strand, having the linkage phosphorus atom in either Rp configuration or Sp configuration.

[0077] In one embodiment, the dsRNA agent further comprises a terminal, chiral modification occurring at the first and second internucleotide linkages at the 3′ end of the antisense strand, having the linkage phosphorus atom in Sp configuration, a terminal, chiral modification occurring at the first internucleotide linkage at the 5′ end of the antisense strand, having the linkage phosphorus atom in Rp configuration, and a terminal, chiral modification occurring at the first internucleotide linkage at the 5′ end of the sense strand, having the linkage phosphorus atom in either Rp or Sp configuration.

[0078] In one embodiment, the dsRNA agent further comprises a terminal, chiral modification occurring at the first, second and third internucleotide linkages at the 3′ end of the antisense strand, having the linkage phosphorus atom in Sp configuration, a terminal, chiral modification occurring at the first internucleotide linkage at the 5′ end of the antisense strand, having the linkage phosphorus atom in Rp configuration, and a terminal, chiral modification occurring at the first internucleotide linkage at the 5′ end of the sense strand, having the linkage phosphorus atom in either Rp or Sp configuration.

[0079] In one embodiment, the dsRNA agent further comprises a terminal, chiral modification occurring at the first, and second internucleotide linkages at the 3′ end of the antisense strand, having the linkage phosphorus atom in Sp configuration, a terminal, chiral modification occurring at the third internucleotide linkages at the 3′ end of the antisense strand, having the linkage phosphorus atom in Rp configuration, a terminal, chiral modification occurring at the first internucleotide linkage at the 5′ end of the antisense strand, having the linkage phosphorus atom in Rp configuration, and a terminal, chiral modification occurring at the first internucleotide linkage at the 5′ end of the sense strand, having the linkage phosphorus atom in either Rp or Sp configuration.

[0080] In one embodiment, the dsRNA agent further comprises a terminal, chiral modification occurring at the first, and second internucleotide linkages at the 3′ end of the antisense strand, having the linkage phosphorus atom in Sp configuration, a terminal, chiral modification occurring at the first, and second internucleotide linkages at the 5′ end of the antisense strand, having the linkage phosphorus atom in Rp configuration, and a terminal, chiral modification occurring at the first internucleotide linkage at the 5′ end of the sense strand, having the linkage phosphorus atom in either Rp or Sp configuration.

[0081] In one embodiment, the dsRNA agent further comprises a phosphate or phosphate mimic at the 5′-end of the antisense strand.

[0082] In one embodiment, the phosphate mimic is a 5′-vinyl phosphonate (VP).

[0083] In one embodiment, the base pair at the 1 position of the 5′-end of the antisense strand of the duplex is an AU base pair.

[0084] In one embodiment, the sense strand has a total of 21 nucleotides and the antisense strand has a total of 23 nucleotides.

[0085] In another embodiment, the RNAi agent is a pharmaceutically acceptable salt thereof. “Pharmaceutically acceptable salts” of each of RNAi agents herein include, but are not limited to, a sodium salt, a calcium salt, a lithium salt, a potassium salt, an ammonium salt, a magnesium salt, an mixtures thereof. One skilled in the art will appreciate that the RNAi agent, when provided as a polycationic salt having one cation per free acid group of the optionally modified phosophodiester backbone and/or any other acidic modifications (e.g., 5′-terminal phosphonate groups). For example, an oligonucleotide of “n” nucleotides in length contains n-1 optionally modified phosophodiesters, so that an oligonucleotide of 21 nt in length may be provided as a salt having up to 20 cations (e.g., 20 sodium cations). Similarly, an RNAi agentshaving a sense strand of 21 nt in length and an antisense strand of 23 nt in length may be provided as a salt having up to 42 cations (e.g., 42 sodium cations). In the preceding example, where the RNAi agent also includes a 5′-terminal phosphate or a 5′-terminal vinylphosphonate group, the RNAi agent may be provided as a salt having up to 44 cations (e.g., 44 sodium cations).

[0086] The present invention further provides cells, pharmaceutical compositions for inhibiting expression of a SGLT2 gene, and pharmaceutical composition comprising a lipid formulation comprising the dsRNA agent of the invention.

[0087] In one aspect, the present invention provides a method of inhibiting expression of a SGLT2 gene in a cell. The method includes contacting the cell with the dsRNA agent of the invention, or the pharmaceutical composition of the invention; and maintaining the cell produced in step (a) for a time sufficient to obtain degradation of the mRNA transcript of a SGLT2 gene, thereby inhibiting expression of the SGLT2 gene in the cell.

[0088] In one embodiment, the cell is within a subject, e.g., a human subject, e.g., a human subject having a SGLT2-associated disorder, such as gout or diabetes.

[0089] In one embodiment, the expression of the SGLT2 gene is inhibited by at least about 30%, 40%, 50%, 60%, 70%, 80%, 90%, or 95%.

[0090] In one aspect, the present invention provides a method of treating a subject having a disorder that would benefit from reduction in SGLT2 expression. The method includes administering to the subject a therapeutically effective amount of any of the dsRNAs of the invention or any of the pharmaceutical compositions of the invention, thereby treating the subject having the disorder that would benefit from reduction in SGLT2 expression.

[0091] In another aspect, the present invention provides a method of preventing at least one symptom in a subject having a disorder that would benefit from reduction in SGLT2 expression. The method includes administering to the subject a prophylactically effective amount of any of the dsRNAs of the invention or any of the pharmaceutical compositions of the invention, thereby preventing at least one symptom in the subject having the disorder that would benefit from reduction in SGLT2 expression.

[0092] In certain embodiments, the disorder is a SGLT2-associated disorder.

[0093] In some embodiments, the SGLT2-associated disorder is gout.

[0094] In some embodiments, the SGLT2 -associated disorder is a metabolic disease selected from the group consisting of disorders of carbohydrates, e.g., diabetes, type I diabetes, type II diabetes, galactosemia, hereditary fructose intolerance, fructose 1,6-diphosphatase deficiency, glycogen storage disorders, congenital disorders of glycosylation, insulin resistance, insulin insufficiency, hyperinsulinemia, impaired glucose tolerance (IGT), abnormal glycogen metabolism; disorders of amino acid metabolism, e.g., maple syrup urine disease (MSUD), or homocystinuria; disorder of organic acid metabolism, e.g.,methylmalonic aciduria, 3-methylglutaconic aciduria-Barth syndrome, glutaric aciduria or 2-hydroxyglutaric aciduria—D and L forms; disorders of fatty acid beta-oxidation, e.g., medium-chain acyl-CoA dehydrogenase deficiency (MCAD), long-chain 3-hydroxyacyl-CoA dehydrogenase deficiency (LCHAD), very-long-chain acyl-CoA dehydrogenase deficiency (VLCAD); disorders of lipid metabolism, e.g., GM1 Gangliosidosis, Tay-Sachs Disease, Sandhoff Disease, Fabry Disease, Gaucher Disease, Niemann-Pick Disease, Krabbe Disease, Mucolipidoses, or Mucopolysaccharidoses; mitochondrial disorders, e.g., mitochondrial cardiomyopathies; Leigh disease; mitochondrial encephalopathy, lactic acidosis, and stroke-like episodes (MELAS); myoclonic epilepsy with ragged-red fibers (MERRF); neuropathy, ataxia, and retinitis pigmentosa (NARP); Barth syndrome; or peroxisomal disorders, e.g., Zellweger Syndrome (cerebrohepatorenal syndrome), X-Linked Adrenoleukodystrophy or Refsum Disease.

[0095] In some embodiments, the SGLT2-associated disease is diabetes. In some embodiments, the SGLT2-associated disease is type II diabetes.

[0096] In one embodiment, the subject is a human.

[0097] In one embodiment, administration of the dsRNA agent to the subject causes a decrease in SGLT2 protein accumulation in the subject. In some embodiments, administration of the dsRNA agent results in a reduction in the blood glucose and/or uric acid level of the subject.

[0098] In one embodiment, the dsRNA agent is administered to the subject at a dose of about 0.01 mg/kg to about 50 mg/kg.

[0099] In some embodiments, the double stranded RNAi agent is administered to the subject orally.

[0100] In some embodiments, the double stranded RNAi agent is administered to the subject subcatenously.

[0101] In one embodiment, the double-stranded RNAi agent is administered by intravenously.

[0102] In certain embodiments, the RNAi agent is further taken up by one or more tissue or cell types, e.g., liver or kidney.

[0103] In one embodiment, the method further comprises determining the level of SGLT2 in a sample(s) from the subject. In some embodiments, the level of SGLT2 in the subject sample(s) is a SGLT2 protein level in a blood or serum sample(s).

[0104] In one embodiment, the method further comprises administering to the subject an additional agent

or a therapy suitable for treatment or prevention of a SGLT2-associated disorder.

[0105] In one embodiment, the additional therapeutic agent is selected from the group consisting of a diabetes mellitus-treating agent, a diabetic complication-treating agent, a cardiovascular diseases-treating agent, an anti-hyperlipemic agent, a hypotensive or antihypertensive agent, an anti-obesity agent, a nonalcoholic steatohepatitis (NASH)-treating agent, a chemotherapeutic agent, an immunotherapeutic agent, an immunosuppressive agent, an anti-inflammatory agent, an anti-steatosis agent, an anti-fibrosis agent, an immune modulator, a tyrosine kinase inhibitor, an antifibrotic agent, and a combination of any of the foregoing.

[0106] The present invention also provides kits comprising any of the dsRNAs of the invention or any of the pharmaceutical compositions of the invention, and optionally, instructions for use. In one embodiment, the invention provides a kit for performing a method of inhibiting expression of SGLT2 gene in a cell by contacting a cell with a double stranded RNAi agent of the invention in an amount effective to inhibit expression of the SGLT2 in the cell. The kit comprises an RNAi agent and instructions for use and, optionally, means for administering the RNAi agent to a subject.

[0107] The present invention is further illustrated by the following detailed description.

### DETAILED DESCRIPTION OF THE INVENTION

[0108] The present invention provides iRNA compositions which effect the RNA-induced silencing complex (RISC)-mediated cleavage of RNA transcripts of a SGLT2 gene. The SGLT2 gene may be within a cell, e.g., a cell within a subject, such as a human. The use of these iRNAs enables the targeted degradation of mRNAs of the corresponding gene (a SGLT2 gene) in mammals.

[0109] The iRNAs of the invention have been designed to target the human SGLT2 gene, including portions of the gene that are conserved in the SGLT2 orthologs of other mammalian species. Without intending to be limited by theory, it is believed that a combination or sub-combination of the foregoing properties and the specific target sites or the specific modifications in these iRNAs confer to the iRNAs of the invention improved efficacy, stability, potency, durability, and safety.

[0110] Accordingly, the present invention provides methods for treating and preventing a SGLT2-associated disorder, e.g., gout or diabetes, using iRNA compositions which effect the RNA-induced silencing complex (RISC)-mediated cleavage of RNA transcripts of a SGLT2 gene.

[0111] The iRNAs of the invention include an RNA strand (the antisense strand) having a region which is up to about 30 nucleotides or less in length, e.g., 15-30, 15-29, 15-28, 15-27, 15-26, 15-25, 15-24, 15-23, 15-22, 15-21, 15-20, 15-19, 15-18, 15-17, 18-30, 18-29, 18-28, 18-27, 18-26, 18-25, 18-24, 18-23, 18-22, 18-21, 18-20, 19-30, 19-29, 19-28, 19-27, 19-26, 19-25, 19-24, 19-23, 19-22, 19-21, 19-20, 20-30, 20-29, 20-28, 20-27, 20-26, 20-25, 20-24, 20-23, 20-22, 20-21, 21-30, 21-29, 21-28, 21-27, 21-26, 21-25, 21-24, 21-23, or 21-22 nucleotides in length, which region is substantially complementary to at least part of an mRNA transcript of a SGLT2 gene.

[0112] In certain embodiments, one or both of the strands of the double stranded RNAi agents of the invention is up to 66 nucleotides in length, e.g., 36-66, 26-36, 25-36, 31-60, 22-43, 27-53 nucleotides in length, with a region of at least 19 contiguous nucleotides that is substantially complementary to at least a part of an mRNA of a SGLT2 gene. In some embodiments, such iRNA agents having longer length antisense strands can, for example, include a second RNA strand (the sense strand) of 20-60 nucleotides in length wherein the sense and antisense strands form a duplex of 18-30 contiguous nucleotides.

[0113] The use of iRNAs of the invention enables the targeted degradation of the SGLT2 mRNAs in mammals. Thus, methods and compositions including these iRNAs are useful for treating a subject having a SGLT2-associated disorder, e.g., gout or diabetes (e.g., type II diabetes), or for treating a subject at risk of developing gout or diabetes.

[0114] Accordingly, the present invention provides methods and combination therapies for treating a subject having a disorder that would benefit from inhibiting or reducing the expression of a SGLT2 gene, e.g., a SGLT2-associated disease, such as gout or diabetes, e.g., type II diabetes, using iRNA compositions which effect the RNA-induced silencing complex (RISC)-mediated cleavage of RNA transcripts of a SGLT2 gene.

[0115] The present invention also provides methods for preventing at least one symptom in a subject having a disorder that would benefit from inhibiting or reducing the expression of a SGLT2 gene, e.g., gour or diabetes, e.g., type II diabetes.

[0116] In one aspect, the present invention provides a RISC complex comprising the dsRNA agent of any one of claims 1-70.

[0117] The following detailed description discloses how to make and use compositions containing iRNAs to inhibit the expression of a SGLT2 gene as well as compositions, uses, and methods for treating subjects that would benefit from inhibition and/or reduction of the expression of a SGLT2 gene, e.g., subjects susceptible to or diagnosed with a SGLT2-associated disorder.

### I. Definitions

[0118] In order that the present invention may be more readily understood, certain terms are first defined. In addition, it should be noted that whenever a value or range of values of a parameter are recited, it is intended that values and ranges intermediate to the recited values are also intended to be part of this invention.

[0119] The articles “a” and “an” are used herein to refer to one or to more than one (i.e., to at least one) of the grammatical object of the article. By way of example, “an element” means one element or more than one element, e.g., a plurality of elements.

[0120] The term “including” is used herein to mean, and is used interchangeably with, the phrase “including but not limited to”.

[0121] The term “or” is used herein to mean, and is used interchangeably with, the term “and/or,” unless context clearly indicates otherwise.

[0122] The term “about” is used herein to mean within the typical ranges of tolerances in the art. For example, “about” can be understood as about 2 standard deviations from the mean. In certain embodiments, about means +10%. In certain embodiments, about means +5%. When about is present before a series of numbers or a range, it is understood that “about” can modify each of the numbers in the series or range.

[0123] The term “at least”, “no less than” or “or more” prior to a number or series of numbers is understood to include the number adjacent to the term “at least”, and all subsequent numbers or integers that could logically be included, as clear from context. For example, the number of nucleotides in a nucleic acid molecule must be an integer. For example, “at least 18 nucleotides of a 21 nucleotide nucleic acid molecule” means that 18, 19, 20, or 21 nucleotides have the indicated property. When at least is present before a series of numbers or a range, it is understood that “at least” can modify each of the numbers in the series or range.

[0124] As used herein, “no more than” or “or less” is understood as the value adjacent to the phrase and logical lower values or integers, as logical from context, to zero. For example, a duplex with an overhang of “no more than 2 nucleotides” has a 2, 1, or 0 nucleotide overhang. When “no more than” is present before a series of numbers or a range, it is understood that “no more than” can modify each of the numbers in the series or range. As used herein, ranges include both the upper and lower limit.

[0125] As used herein, methods of detection can include determination that the amount of analyte present is below the level of detection of the method.

[0126] In the event of a conflict between an indicated target site and the nucleotide sequence for a sense or antisense strand, the indicated sequence takes precedence.

[0127] In the event of a conflict between a sequence and its indicated site on a transcript or other sequence, the nucleotide sequence recited in the specification takes precedence.

[0128] As used herein, the term “Sodium-glucose cotransporter-2” (“SGLT2”) refers to the well-known gene and polypeptide, also known in the art as Solute Carrier Family 5 Member 2, SLC5A2, and low affinity sodium-glucose cotransporter. SGLT2 is a member of the sodium glucose cotransporter family which are sodium-dependent glucose transport proteins. SGLT2 is the major cotransporter involved in glucose reabsorption in the kidney.

[0129] The term “SGLT2” includes human SGLT2, the amino acid and nucleotide sequences of which may be found in, for example, GenBank Accession No. NM_003041.4 (GI: 1519244485; SEQ ID NO:1); mouse SGLT2, the amino acid and nucleotide sequence of which may be found in. for example, GenBank Accession No. NM_133254.5 (GI: 1685839526, SEQ ID NO: 2); and rat SGLT2, the amino acid and nucleotide sequence of which may be found in, for example, GenBank Accession No.: NM_022590.2 (GI: 78486543; SEQ ID NO: 3).

[0130] The term “SGLT2” also includes Macaca mulatta SGLT2, the amino acid and nucleotide sequence of which may be found in, for example, GenBank Accession No. XM_015126028.2 (GI: 1622915477; SEQ ID NO: 4) and Macaca fascicularis SGLT2, the amino acid and nucleotide sequence of which may be found in, for example, GenBank Accession No. XM_005591767.2 (GI: 982318456; SEQ ID NO:5).

[0131] Additional examples of SGLT2 mRNA sequences are readily available using, e.g., GenBank, UniProt, OMIM, and the Macaca genome project web site.

[0132] Exemplary SGLT2 nucleotide sequences may also be found in SEQ ID NOs: 1-10. SEQ ID NOs:6-10 are the reverse complement sequences of SEQ ID NOs: 1-5, respectively.

[0133] Further information on SGLT2 is provided, for example in the NCBI Gene database at https://www.ncbi.nlm.nih.gov/gene/1803.

[0134] The entire contents of each of the foregoing GenBank Accession numbers and the Gene database numbers are incorporated herein by reference as of the date of filing this application. The terms “Sodium-glucose cotransporter-2” and “SGLT2,” as used herein, also refers to naturally occurring DNA sequence variations of the SGLT2 gene. Numerous sequence variations within the SGLT2 gene have been identified and may be found at, for example, NCBI dbSNP and UniProt (see, e.g., https://www.ncbi.nlm.nih.gov/snp/?term=SGLT2), the entire contents of which is incorporated herein by reference as of the date of filing this application.

[0135] As used herein, “target sequence” refers to a contiguous portion of the nucleotide sequence of an mRNA molecule formed during the transcription of a SGLT2 gene, including mRNA that is a product of RNA processing of a primary transcription product. In one embodiment, the target portion of the sequence will be at least long enough to serve as a substrate for RNAi-directed cleavage at or near that portion of the nucleotide sequence of an mRNA molecule formed during the transcription of a SGLT2 gene. In one embodiment, the target sequence is within the protein coding region of the SGLT2 gene. In another embodiment, the target sequence is within the 3′ UTR of the SGLT2 gene.

[0136] The target sequence may be from about 9-36 nucleotides in length, e.g., about 15-30 nucleotides in length. For example, the target sequence can be about 15-30 nucleotides, 15-29, 15-28, 15-27, 15-26, 15-25, 15-24, 15-23, 15-22, 15-21, 15-20, 15-19, 15-18, 15-17, 18-30, 18-29, 18-28, 18-27, 18-26, 18-25, 18-24, 18-23, 18-22, 18-21, 18-20, 19-30, 19-29, 19-28, 19-27, 19-26, 19-25, 19-24, 19-23, 19-22, 19-21, 19-20, 20-30, 20-29, 20-28, 20-27, 20-26, 20-25, 20-24, 20-23, 20-22, 20-21, 21-30, 21-29, 21-28, 21-27, 21-26, 21-25, 21-24, 21-23, or 21-22 nucleotides in length. In some embodiments, the target sequence is about 19 to about 30 nucleotides in length. In other embodiments, the target sequence is about 19 to about 25 nucleotides in length. In still other embodiments, the target sequence is about 19 to about 23 nucleotides in length. In some embodiments, the target sequence is about 21 to about 23 nucleotides in length. Ranges and lengths intermediate to the above recited ranges and lengths are also contemplated to be part of the invention.

[0137] As used herein, the term “strand comprising a sequence” refers to an oligonucleotide comprising a chain of nucleotides that is described by the sequence referred to using the standard nucleotide nomenclature.

[0138] “G,” “C,” “A,” “T,” and “U” each generally stand for a nucleotide that contains guanine, cytosine, adenine, thymidine, and uracil as a base, respectively. However, it will be understood that the term “ribonucleotide” or “nucleotide” can also refer to a modified nucleotide, as further detailed below, or a surrogate replacement moiety (see, e.g., Table 1). The skilled person is well aware that guanine, cytosine, adenine, and uracil can be replaced by other moieties without substantially altering the base pairing properties of an oligonucleotide comprising a nucleotide bearing such replacement moiety. It is understood that when a cDNA sequence is provided, the corresponding mRNA or RNAi agent would include a U in place of a T. For example, without limitation, a nucleotide comprising inosine as its base can base pair with nucleotides containing adenine, cytosine, or uracil. Hence, nucleotides containing uracil, guanine, or adenine can be replaced in the nucleotide sequences of dsRNA featured in the invention by a nucleotide containing, for example, inosine. In another example, adenine and cytosine anywhere in the oligonucleotide can be replaced with guanine and uracil, respectively to form G-U Wobble base pairing with the target mRNA. Sequences containing such replacement moieties are suitable for the compositions and methods featured in the invention. Further, one of skill in the art that a T is a target gene sequence, or reverse complement thereof, would often be replaced by a U in an RNAi agent of the invention.

[0139] The terms “iRNA”, “RNAi agent,” “iRNA agent,” “RNA interference agent” as used interchangeably herein, refer to an agent that contains RNA as that term is defined herein, and which mediates the targeted cleavage of an RNA transcript via an RNA-induced silencing complex (RISC) pathway. RNA interference (RNAi) is a process that directs the sequence-specific degradation of mRNA. RNAi modulates, e.g., inhibits, the expression of a SGLT2 gene in a cell, e.g., a cell within a subject, such as a mammalian subject.

[0140] In one embodiment, an RNAi agent of the disclosure includes a single stranded RNAi that interacts with a target RNA sequence, e.g., a SGLT2 mRNA sequence, to direct the cleavage of the target RNA. Without wishing to be bound by theory it is believed that long double stranded RNA introduced into cells is broken down into double-stranded short interfering RNAs (siRNAs) comprising a sense strand and an antisense strand by a Type III endonuclease known as Dicer (Sharp et al. (2001) Genes Dev. 15:485). Dicer, a ribonuclease-III-like enzyme, processes these dsRNA into 19-23 base pair short interfering RNAs with characteristic two base 3′ overhangs (Bernstein, et al., (2001) Nature 409:363). These siRNAs are then incorporated into an RNA-induced silencing complex (RISC) where one or more helicases unwind the siRNA duplex, enabling the complementary antisense strand to guide target recognition (Nykanen, et al., (2001) Cell 107:309). Upon binding to the appropriate target mRNA, one or more endonucleases within the RISC cleave the target to induce silencing (Elbashir, et al., (2001) Genes Dev. 15:188). Thus, in one aspect the disclosure relates to a single stranded RNA (ssRNA) (the antisense strand of a siRNA duplex) generated within a cell and which promotes the formation of a RISC complex to effect silencing of the target gene. Accordingly, the term “siRNA” is also used herein to refer to an RNAi as described above.

[0141] In another embodiment, the RNAi agent may be a single-stranded RNA that is introduced into a cell or organism to inhibit a target mRNA. Single-stranded RNAi agents bind to the RISC endonuclease, Argonaute 2, which then cleaves the target mRNA. The single-stranded siRNAs are generally 15-30 nucleotides and are chemically modified. The design and testing of single-stranded RNAs are described in U.S. Pat. No. 8,101,348 and in Lima et al., (2012) Cell 150:883-894, the entire contents of each of which are hereby incorporated herein by reference. Any of the antisense nucleotide sequences described herein may be used as a single-stranded siRNA as described herein or as chemically modified by the methods described in Lima et al., (2012) Cell 150:883-894.

[0142] In another embodiment, an “RNAi agent” for use in the compositions and methods of the disclosure is a double stranded RNA and is referred to herein as a “double stranded RNAi agent.” “double stranded RNA (dsRNA) molecule.” “dsRNA agent,” or “dsRNA”. The term “dsRNA” refers to a complex of ribonucleic acid molecules, having a duplex structure comprising two anti-parallel and substantially complementary nucleic acid strands, referred to as having “sense” and “antisense” orientations with respect to a target RNA, i.e., a SGLT2 mRNA sequence. In some embodiments of the disclosure, a double stranded RNA (dsRNA) triggers the degradation of a target RNA, e.g., an mRNA, through a post-transcriptional gene-silencing mechanism referred to herein as RNA interference or RNAi.

[0143] In general, a dsRNA molecule can include ribonucleotides, but as described in detail herein, each or both strands can also include one or more non-ribonucleotides, e.g., a deoxyribonucleotide, a modified nucleotide. In addition, as used in this specification, an “RNAi agent” may include ribonucleotides with chemical modifications; an RNAi agent may include substantial modifications at multiple nucleotides.

[0144] As used herein, the term “modified nucleotide” refers to a nucleotide having, independently, a modified sugar moiety, a modified internucleotide linkage, or a modified nucleobase. Thus, the term modified nucleotide encompasses substitutions, additions or removal of, e.g., a functional group or atom, to internucleoside linkages, sugar moieties, or nucleobases. The modifications suitable for use in the agents of the disclosure include all types of modifications disclosed herein or known in the art. Any such modifications, as used in a siRNA type molecule, are encompassed by “RNAi agent” for the purposes of this specification and claims.

[0145] In certain embodiments of the instant disclosure, inclusion of a deoxy-nucleotide—which is acknowledged as a naturally occurring form of nucleotide—if present within a RNAi agent can be considered to constitute a modified nucleotide.

[0146] The duplex region may be of any length that permits specific degradation of a desired target RNA through a RISC pathway, and may range from about 9 to 36 base pairs in length, e.g., about 15-30 base pairs in length, for example, about 9, 10, 11, 12, 13, 14, 15, 16, 17, 18, 19, 20, 21, 22, 23, 24, 25, 26, 27, 28, 29, 30, 31, 32, 33, 34, 35, or 36 base pairs in length, such as about 15-30, 15-29, 15-28, 15-27, 15-26, 15-25, 15-24, 15-23, 15-22, 15-21, 15-20, 15-19, 15-18, 15-17, 18-30, 18-29, 18-28, 18-27, 18-26, 18-25, 18-24, 18-23, 18-22, 18-21, 18-20, 19-30, 19-29, 19-28, 19-27, 19-26, 19-25, 19-24, 19-23, 19-22, 19-21, 19-20, 20-30, 20-29, 20-28, 20-27, 20-26, 20-25, 20-24, 20-23, 20-22, 20-21, 21-30, 21-29, 21-28, 21-27, 21-26, 21-25, 21-24, 21-23, or 21-22 base pairs in length. Ranges and lengths intermediate to the above recited ranges and lengths are also contemplated to be part of the invention.

[0147] The two strands forming the duplex structure may be different portions of one larger RNA molecule, or they may be separate RNA molecules. Where the two strands are part of one larger molecule, and therefore are connected by an uninterrupted chain of nucleotides between the 3′-end of one strand and the 5′-end of the respective other strand forming the duplex structure, the connecting RNA chain is referred to as a “hairpin loop.” A hairpin loop can comprise at least one unpaired nucleotide. In some embodiments, the hairpin loop can comprise at at least 4, at least 5, at least 6, at least 7, at least 8, at least 9, at least 10, at least 20, at least 23 or more unpaired nucleotides or nucleotides not directed to the target site of the dsRNA. In some embodiments, the hairpin loop can be 10 or fewer nucleotides. In some embodiments, the hairpin loop can be 8 or fewer unpaired nucleotides. In some embodiments, the hairpin loop can be 4-10 unpaired nucleotides. In some embodiments, the hairpin loop can be 4-8 nucleotides.

[0148] In certain embodiment, the two strands of double-stranded oligomeric compound can be linked together. The two strands can be linked to each other at both ends, or at one end only. By linking at one end is meant that 5′-end of first strand is linked to the 3′-end of the second strand or 3′-end of first strand is linked to 5′-end of the second strand. When the two strands are linked to each other at both ends. 5′-end of first strand is linked to 3′-end of second strand and 3′-end of first strand is linked to 5′-end of second strand. The two strands can be linked together by an oligonucleotide linker including, but not limited to, (N)n; wherein N is independently a modified or unmodified nucleotide and n is 3-23. In some embodicmtns, n is 3-10, e.g., 3, 4, 5, 6, 7, 8, 9, or 10. In some embodiments, the oligonucleotide linker is selected from the group consisting of GNRA. (G)4, (U)4, and (dT)4, whercin N is a modified or unmodified nucleotide and R is a modified or unmodified purine nucleotide. Some of the nucleotides in the linker can be involved in base-pair interactions with other nucleotides in the linker. The two strands can also be linked together by a non-nucleosidic linker, e.g. a linker described herein. It will be appreciated by one of skill in the art that any oligonucleotide chemical modifications or variations describe herein can be used in the oligonucleotide linker.

[0149] Hairpin and dumbbell type oligomeric compounds will have a duplex region equal to or at least 14, 15, 15, 16, 17, 18, 19, 29, 21, 22, 23, 24, or 25 nucleotide pairs. The duplex region can be equal to or less than 200, 100, or 50, in length. In some embodiments, ranges for the duplex region are 15-30, 17 to 23, 19 to 23, and 19 to 21 nucleotides pairs in length.

[0150] The hairpin oligomeric compounds can have a single strand overhang or terminal unpaired region, in some embodiments at the 3′, and in some embodiments on the antisense side of the hairpin. In some embodiments, the overhangs are 1-4, more generally 2-3 nucleotides in length. The hairpin oligomeric compounds that can induce RNA interference are also referred to as “shRNA” herein.

[0151] Where the two substantially complementary strands of a dsRNA are comprised by separate RNA molecules, those molecules need not, but can be covalently connected. Where the two strands are connected covalently by means other than an uninterrupted chain of nucleotides between the 3′-end of one strand and the 5′-end of the respective other strand forming the duplex structure, the connecting structure is referred to as a “linker.” The RNA strands may have the same or a different number of nucleotides. The maximum number of base pairs is the number of nucleotides in the shortest strand of the dsRNA minus any overhangs that are present in the duplex. In addition to the duplex structure, an RNAi may comprise one or more nucleotide overhangs.

[0152] In one embodiment, an RNAi agent of the invention is a dsRNA, cach strand of which is 24-30 nucleotides in length, that interacts with a target RNA sequence, e.g., a SGLT2 mRNA sequence, to direct the cleavage of the target RNA. Without wishing to be bound by theory, long double stranded RNA introduced into cells is broken down into siRNA by a Type III endonuclease known as Dicer (Sharp et al. (2001) Genes Dev. 15:485). Dicer, a ribonuclease-III-like enzyme, processes the dsRNA into 19-23 base pair short interfering RNAs with characteristic two base 3′ overhangs (Bernstein, et al., (2001) Nature 409:363). The siRNAs are then incorporated into an RNA-induced silencing complex (RISC) where one or more helicases unwind the siRNA duplex, enabling the complementary antisense strand to guide target recognition (Nykanen, et al., (2001) Cell 107:309). Upon binding to the appropriate target mRNA, one or more endonucleases within the RISC cleave the target to induce silencing (Elbashir, et al., (2001) Genes Dev. 15:188).

[0153] In one embodiment, an RNAi agent of the invention is a dsRNA agent, each strand of which comprises 19-23 nucleotides that interacts with a SGLT2 mRNA sequence to direct the cleavage of the target RNA. Without wishing to be bound by theory, long double stranded RNA introduced into cells is broken down into siRNA by a Type III endonuclease known as Dicer (Sharp et al. (2001) Genes Dev. 15:485). Dicer, a ribonuclease-III-like enzyme, processes the dsRNA into 19-23 base pair short interfering RNAs with characteristic two base 3′ overhangs (Bernstein, et al., (2001) Nature 409:363). The siRNAs are then incorporated into an RNA-induced silencing complex (RISC) where one or more helicases unwind the siRNA duplex, enabling the complementary antisense strand to guide target recognition (Nykanen, et al., (2001) Cell 107:309). Upon binding to the appropriate target mRNA, one or more endonucleases within the RISC cleave the target to induce silencing (Elbashir, et al., (2001) Genes Dev. 15:188). In one embodiment, an RNAi agent of the invention is a dsRNA of 24-30 nucleotides that interacts with a SGLT2 mRNA sequence to direct the cleavage of the target RNA.

[0154] As used herein, the term “nucleotide overhang” refers to at least one unpaired nucleotide that protrudes from the duplex structure of a RNAi agent, e.g., a dsRNA. For example, when a 3′-end of one strand of a dsRNA extends beyond the 5′-end of the other strand, or vice versa, there is a nucleotide overhang. A dsRNA can comprise an overhang of at least one nucleotide; alternatively, the overhang can comprise at least two nucleotides, at least three nucleotides, at least four nucleotides, at least five nucleotides or more. A nucleotide overhang can comprise or consist of a nucleotide/nucleoside analog, including a deoxynucleotide/nucleoside. The overhang(s) can be on the sense strand, the antisense strand or any combination thereof. Furthermore, the nucleotide(s) of an overhang can be present on the 5′-end, 3′-end or both ends of either an antisense or sense strand of a dsRNA.

[0155] In one embodiment of the dsRNA, at least one strand comprises a 3′ overhang of at least 1 nucleotide. In another embodiment, at least one strand comprises a 3′ overhang of at least 2 nucleotides, e.g., 2, 3, 4, 5, 6, 7, 9, 10, 11, 12, 13, 14, or 15 nucleotides. In other embodiments, at least one strand of the RNAi agent comprises a 5′ overhang of at least 1 nucleotide. In certain embodiments, at least one strand comprises a 5′ overhang of at least 2 nucleotides, e.g., 2, 3, 4, 5, 6, 7, 9, 10, 11, 12, 13, 14, or 15 nucleotides. In still other embodiments, both the 3′ and the 5′ end of one strand of the RNAi agent comprise an overhang of at least 1 nucleotide.

[0156] In one embodiment, the antisense strand of a dsRNA has a 1-10 nucleotide, e.g., 0-3, 1-3, 2-4, 2-5, 4-10, 5-10, e.g., a 1, 2, 3, 4, 5, 6, 7, 8, 9, or 10 nucleotide, overhang at the 3′-end or the 5′-end.

[0157] In one embodiment, the sense strand of a dsRNA has a 1-10 nucleotide, e.g., a 1, 2, 3, 4, 5, 6, 7, 8, 9, or 10 nucleotide, overhang at the 3′-end or the 5′-end. In another embodiment, one or more of the nucleotides in the overhang is replaced with a nucleoside thiophosphate.

[0158] In certain embodiments, the overhang on the sense strand or the antisense strand, or both, can include extended lengths longer than 10 nucleotides, e.g., 1-30 nucleotides, 2-30 nucleotides, 10-30 nucleotides, or 10-15 nucleotides in length. In certain embodiments, an extended overhang is on the sense strand of the duplex. In certain embodiments, an extended overhang is present on the 3′end of the sense strand of the duplex. In certain embodiments, an extended overhang is present on the 5′end of the sense strand of the duplex. In certain embodiments, an extended overhang is on the antisense strand of the duplex. In certain embodiments, an extended overhang is present on the 3′end of the antisense strand of the duplex. In certain embodiments, an extended overhang is present on the 5′end of the antisense strand of the duplex. In certain embodiments, one or more of the nucleotides in the overhang is replaced with a nucleoside thiophosphate. In certain embodiments, the overhang includes a self-complementary portion such that the overhang is capable of forming a hairpin structure that is stable under physiological conditions.

[0159] The terms “blunt” or “blunt ended” as used herein in reference to a dsRNA mean that there are no unpaired nucleotides or nucleotide analogs at a given terminal end of a dsRNA, i.e., no nucleotide overhang. One or both ends of a dsRNA can be blunt. Where both ends of a dsRNA are blunt, the dsRNA is said to be blunt ended. To be clear, a “blunt ended” dsRNA is a dsRNA that is blunt at both ends, i.e., no nucleotide overhang at either end of the molecule. Most often such a molecule will be double stranded over its entire length.

[0160] The term “antisense strand” or “guide strand” refers to the strand of an iRNA, e.g., a dsRNA, which includes a region that is substantially complementary to a target sequence, e.g., a SGLT2 mRNA sequence.

[0161] As used herein, the term “region of complementarity” refers to the region on the antisense strand that is substantially complementary to a sequence, for example a target sequence, e.g., a SGLT2 nucleotide sequence, as defined herein. Where the region of complementarity is not fully complementary to the target sequence, the mismatches can be in the internal or terminal regions of the molecule. Generally, the most tolerated mismatches are in the terminal regions, e.g., within 5, 4, 3, or 2 nucleotides of the 5′- or 3′-terminus of the RNAi agent.

[0162] In some embodiments, a double stranded RNA agent of the invention includes a nucleotide mismatch in the antisense strand. In some embodiments, the antisense strand of the double stranded RNA agent of the invention includes no more than 4 mismatches with the target mRNA, e.g., the antisense strand includes 4, 3, 2, 1, or 0 mismatches with the target mRNA. In some embodiments, the antisense strand double stranded RNA agent of the invention includes no more than 4 mismatches with the sense strand, e.g., the antisense strand includes 4, 3, 2, 1, or 0 mismatches with the sense strand. In some embodiments, a double stranded RNA agent of the invention includes a nucleotide mismatch in the sense strand. In some embodiments, the sense strand of the double stranded RNA agent of the invention includes no more than 4 mismatches with the antisense strand, e.g., the sense strand includes 4, 3, 2, 1, or 0 mismatches with the antisense strand. In some embodiments, the nucleotide mismatch is, for example, within 5, 4, 3 nucleotides from the 3′-end of the iRNA. In another embodiment, the nucleotide mismatch is, for example, in the 3′-terminal nucleotide of the iRNA agent. In some embodiments, the mismatch(s) is not in the seed region.

[0163] Thus, an RNAi agent as described herein can contain one or more mismatches to the target sequence. In one embodiment, a RNAi agent as described herein contains no more than 3 mismatches (i.e., 3, 2, 1, or 0 mismatches). In one embodiment, an RNAi agent as described herein contains no more than 2 mismatches. In one embodiment, an RNAi agent as described herein contains no more than 1 mismatch. In one embodiment, an RNAi agent as described herein contains 0 mismatches. In certain embodiments, if the antisense strand of the RNAi agent contains mismatches to the target sequence, the mismatch can optionally be restricted to be within the last 5 nucleotides from either the 5′- or 3′-end of the region of complementarity. For example, in such embodiments, for a 23 nucleotide RNAi agent, the strand which is complementary to a region of a SGLT2 gene, generally does not contain any mismatch within the central 13 nucleotides. The methods described herein or methods known in the art can be used to determine whether an RNAi agent containing a mismatch to a target sequence is effective in inhibiting the expression of a SGLT2 gene. Consideration of the efficacy of RNAi agents with mismatches in inhibiting expression of a SGLT2 gene is important, especially if the particular region of complementarity in a SGLT2 gene is known to vary.

[0164] The term “sense strand” or “passenger strand” as used herein, refers to the strand of a RNAi agent that includes a region that is substantially complementary to a region of the antisense strand as that term is defined herein.

[0165] As used herein, “substantially all of the nucleotides are modified” are largely but not wholly modified and can include not more than 5, 4, 3, 2, or 1 unmodified nucleotides.

[0166] As used herein, the term “cleavage region” refers to a region that is located immediately adjacent to the cleavage site. The cleavage site is the site on the target at which cleavage occurs. In some embodiments, the cleavage region comprises three bases on either end of, and immediately adjacent to, the cleavage site. In some embodiments, the cleavage region comprises two bases on either end of, and immediately adjacent to, the cleavage site. In some embodiments, the cleavage site specifically occurs at the site bound by nucleotides 10 and 11 of the antisense strand, and the cleavage region comprises nucleotides 11, 12 and 13.

[0167] As used herein, and unless otherwise indicated, the term “complementary.” when used to describe a first nucleotide sequence in relation to a second nucleotide sequence, refers to the ability of an oligonucleotide or polynucleotide comprising the first nucleotide sequence to hybridize and form a duplex structure under certain conditions with an oligonucleotide or polynucleotide comprising the second nucleotide sequence, as will be understood by the skilled person. Such conditions can be, for example, “stringent conditions”, where stringent conditions can include: 400 mM NaCl, 40 mM PIPES pH 6.4, 1 mM EDTA, 50 oC or 70 oC for 12-16 hours followed by washing (see, e.g., “Molecular Cloning: A Laboratory Manual, Sambrook, et al. (1989) Cold Spring Harbor Laboratory Press). Other conditions, such as physiologically relevant conditions as can be encountered inside an organism, can apply. The skilled person will be able to determine the set of conditions most appropriate for a test of complementarity of two sequences in accordance with the ultimate application of the hybridized nucleotides.

[0168] Complementary sequences within a RNAi agent, e.g., within a dsRNA as described herein, include base-pairing of the oligonucleotide or polynucleotide comprising a first nucleotide sequence to an oligonucleotide or polynucleotide comprising a second nucleotide sequence over the entire length of one or both nucleotide sequences. Such sequences can be referred to as “fully complementary” with respect to each other herein. However, where a first sequence is referred to as “substantially complementary” with respect to a second sequence herein, the two sequences can be fully complementary, or they can form one or more, but generally not more than 5, 4, 3, or 2 mismatched base pairs upon hybridization for a duplex up to 30 base pairs, while retaining the ability to hybridize under the conditions most relevant to their ultimate application, e.g., inhibition of gene expression , in vitro or in vivo. However, where two oligonucleotides are designed to form, upon hybridization, one or more single stranded overhangs, such overhangs shall not be regarded as mismatches with regard to the determination of complementarity. For example, a dsRNA comprising one oligonucleotide 21 nucleotides in length and another oligonucleotide 23 nucleotides in length. wherein the longer oligonucleotide comprises a sequence of 21 nucleotides that is fully complementary to the shorter oligonucleotide, can yet be referred to as “fully complementary” for the purposes described herein.

[0169] “Complementary” sequences, as used herein, can also include, or be formed entirely from, non-Watson-Crick base pairs or base pairs formed from non-natural and modified nucleotides, in so far as the above requirements with respect to their ability to hybridize are fulfilled. Such non-Watson-Crick base pairs include, but are not limited to, G:U Wobble or Hoogsteen base pairing.

[0170] The terms “complementary.” “fully complementary” and “substantially complementary” herein can be used with respect to the base matching between the sense strand and the antisense strand of a dsRNA, or between two oligonucleotides or polynucleotides, such as the antisense strand of a RNAi agent and a target sequence, as will be understood from the context of their use.

[0171] As used herein, a polynucleotide that is “substantially complementary to at least part of” a messenger RNA (mRNA) or target sequence refers to a polynucleotide that is substantially complementary to a contiguous portion of the mRNA of interest or target sequence (e.g., an mRNA encoding SGLT2). For example, a polynucleotide is complementary to at least a part of a SGLT2 RNA if the sequence is substantially complementary to a non-interrupted portion of an mRNA encoding SGLT2.

[0172] Accordingly, in some embodiments, the antisense strand polynucleotides disclosed herein are fully complementary to the target SGLT2 sequence.

[0173] In other embodiments, the antisense strand polynucleotides disclosed herein are substantially complementary to the target SGLT2 sequence and comprise a contiguous nucleotide sequence which is at least about 80% complementary over its entire length to the equivalent region of the nucleotide sequence of SEQ ID NOs: 1-5 for SGLT2, or a fragment of SEQ ID NOs: 1-5, such as about 85%, 86%, 87%, 88%, 89%, 90%, 91%, 92%, 93%, 94%, 95%, 96%, 97%, 98%, or about 99% complementary.

[0174] In other embodiments, the antisense polynucleotides disclosed herein are substantially complementary to the target SGLT2 sequence and comprise a contiguous nucleotide sequence which is at least about 80% complementary over its entire length to any one of the sense strand nucleotide sequences in any one of Tables 2-3, or a fragment of any one of the sense strand nucleotide sequences in any one of Tables 2-3, such as about 85%, 86%, 87%, 88%, 89%, 90%, 91%, 92%, 93%, 94%, 95%, 96%, 97%, 98%, or about 99% complementary.

[0175] In one embodiment, an RNAi agent of the disclosure includes a sense strand that is substantially complementary to an antisense polynucleotide which, in turn, is the same as a target SGLT2 sequence, and wherein the sense strand polynucleotide comprises a contiguous nucleotide sequence which is at least about 80% complementary over its entire length to the equivalent region of the nucleotide sequence of SEQ ID NOs: 6-10, or a fragment of any one of SEQ ID NOs: 6-10, such as about 86%, 87%, 88%, 89%, 90%, 91%, 92%, 93%, 94%, 95%, 96%, 97%, 98%, or about 99% complementary.

[0176] In some embodiments, an iRNA of the invention includes a sense strand that is substantially complementary to an antisense polynucleotide which, in turn, is complementary to a target SGLT2 sequence, and wherein the sense strand polynucleotide comprises a contiguous nucleotide sequence which is at least about 80% complementary over its entire length to any one of the antisense strand nucleotide sequences in any one of any one of Tables 2-3, or a fragment of any one of the antisense strand nucleotide sequences in any one of Tables 2-3, such as about 86%, 87%, 88%, 89%, 90%, 91%, 92%, 93%, 94%, 95%, 96%, 97%, 98%, or about 99% complementary.

[0177] In some embodiments, the double-stranded region of a double-stranded iRNA agent is equal to or at least, 10, 11, 12, 13, 14, 15, 16, 17, 18, 19, 20, 21, 22, 23, 23, 24, 25, 26, 27, 28, 29, 30 or more nucleotide pairs in length.

[0178] In some embodiments, the antisense strand of a double-stranded iRNA agent is equal to or at least 14, 15, 16, 17, 18, 19, 20, 21, 22, 23, 23, 24, 25, 26, 27, 28, 29, or 30 nucleotides in length.

[0179] In some embodiments, the sense strand of a double-stranded iRNA agent is equal to or at least 10, 11, 12, 13, 14, 15, 16, 17, 18, 19, 20, 21, 22, 23, 23, 24, 25, 26, 27, 28, 29, or 30 nucleotides in length.

[0180] In one embodiment, the sense and antisense strands of the double-stranded iRNA agent are each independently 15 to 30 nucleotides in length.

[0181] In one embodiment, the sense and antisense strands of the double-stranded iRNA agent are each independently 19 to 25 nucleotides in length.

[0182] In one embodiment, the sense and antisense strands of the double-stranded iRNA agent are each independently 21 to 23 nucleotides in length.

[0183] In one embodiment, the sense strand of the iRNA agent is 21-nucleotides in length, and the antisense strand is 23-nucleotides in length, wherein the strands form a double-stranded region of 21 consecutive base pairs having a 2-nucleotide long single stranded overhangs at the 3′-end.

[0184] In one aspect of the invention, an agent for use in the methods and compositions of the invention is a single-stranded antisense nucleic acid molecule that inhibits a target mRNA via an antisense inhibition mechanism. The single-stranded antisense RNA molecule is complementary to a sequence within the target mRNA. The single-stranded antisense oligonucleotides can inhibit translation in a stoichiometric manner by base pairing to the mRNA and physically obstructing the translation machinery, see Dias, N. et al., (2002) Mol Cancer Ther 1:347-355. The single-stranded antisense RNA molecule may be about 15 to about 30 nucleotides in length and have a sequence that is complementary to a target sequence. For example, the single-stranded antisense RNA molecule may comprise a sequence that is at least about 15, 16, 17, 18, 19, 20, or more contiguous nucleotides from any one of the antisense sequences described herein.

[0185] In one embodiment, at least partial suppression of the expression of a SGLT2 gene, is assessed by a reduction of the amount of SGLT2 mRNA which can be isolated from or detected in a first cell or group of cells in which a SGLT2 gene is transcribed and which has or have been treated such that the expression of a SGLT2 gene is inhibited, as compared to a second cell or group of cells substantially identical to the first cell or group of cells but which has or have not been so treated (control cells). The degree of inhibition may be expressed in terms of:

$$\frac{( mRNA in control cells ) - ( mRNA in treated cells )}{( mRNA in control cells )} 100 \%$$

[0186] In one embodiment, inhibition of expression is determined by the dual luciferase method wherein the RNAi agent is present at 10 nM.

[0187] The phrase “contacting a cell with an RNAi agent,” such as a dsRNA, as used herein, includes contacting a cell by any possible means. Contacting a cell with an RNAi agent includes contacting a cell in vitro with the RNAi agent or contacting a cell in vivo with the RNAi agent. The contacting may be done directly or indirectly. Thus, for example, the RNAi agent may be put into physical contact with the cell by the individual performing the method, or alternatively, the RNAi agent may be put into a situation that will permit or cause it to subsequently come into contact with the cell.

[0188] Contacting a cell in vitro may be done, for example, by incubating the cell with the RNAi agent. Contacting a cell in vivo may be done, for example, by injecting the RNAi agent into or near the tissue where the cell is located, or by injecting the RNAi agent into another area, or to the bloodstream or the subcutaneous space, such that the agent will subsequently reach the tissue where the cell to be contacted is located. For example, the RNAi agent may contain or be coupled to a ligand, e.g., a lipophilic moiety or moieties as described below and further detailed, e.g., in PCT Publication No. WO 2019/217459, the entire contents of which is incorporated herein by reference. that directs or otherwise stabilizes the RNAi agent at a site of interest, e.g., the liver or the kidney. In some embodiments, the RNAi agent may contain or be coupled to a ligand, e.g., one or more GalNAc derivatives as described below, that directs or otherwise stabilizes the RNAi agent at a site of interest, e.g., the liver. In other embodiments, the RNAi agent may contain or be coupled to a lipophilic moiety or moieties and one or more GalNAc derivatives. Combinations of in vitro and in vivo methods of contacting are also possible. For example, a cell may also be contacted in vitro with an RNAi agent and subsequently transplanted into a subject.

[0189] In one embodiment, contacting a cell with an RNAi agent includes “introducing” or “delivering the RNAi agent into the cell” by facilitating or effecting uptake or absorption into the cell. Absorption or uptake of a RNAi agent can occur through unaided diffusive or active cellular processes, or by auxiliary agents or devices. Introducing a RNAi agent into a cell may be in vitro or in vivo. For example, for in vivo introduction, a RNAi agent can be injected into a tissue site or administered systemically. In vitro introduction into a cell includes methods known in the art such as electroporation and lipofection. Further approaches are described herein below or are known in the art.

[0190] The term “lipophile” or “lipophilic moiety” broadly refers to any compound or chemical moiety having an affinity for lipids. One way to characterize the lipophilicity of the lipophilic moiety is by the octanol-water partition coefficient, log K_{ow}, where K_{ow} is the ratio of a chemical's concentration in the octanol-phase to its concentration in the aqueous phase of a two-phase system at equilibrium. The octanol-water partition coefficient is a laboratory-measured property of a substance. However, it may also be predicted by using coefficients attributed to the structural components of a chemical which are calculated using first-principle or empirical methods (see, for example, Tetko et al., J. Chem. Inf. Comput. Sci. 41:1407-21 (2001), which is incorporated herein by reference in its entirety). It provides a thermodynamic measure of the tendency of the substance to prefer a non-aqueous or oily milieu rather than water (i.e. its hydrophilic/lipophilic balance). In principle, a chemical substance is lipophilic in character when its log K_{ow} exceeds 0. Typically, the lipophilic moiety possesses a log K_{ow} exceeding 1, exceeding 1.5, exceeding 2, exceeding 3, exceeding 4, exceeding 5, or exceeding 10. For instance, the log K_{ow} of 6-amino hexanol, for instance, is predicted to be approximately 0.7. Using the same method, the log K_{ow} of cholesteryl N-(hexan-6-ol) carbamate is predicted to be 10.7.

[0191] The lipophilicity of a molecule can change with respect to the functional group it carries. For instance, adding a hydroxyl group or amine group to the end of a lipophilic moiety can increase or decrease the partition coefficient (e.g., log K_{ow}) value of the lipophilic moiety.

[0192] Alternatively, the hydrophobicity of the double-stranded RNAi agent, conjugated to one or more lipophilic moieties, can be measured by its protein binding characteristics. For instance, in certain embodiments, the unbound fraction in the plasma protein binding assay of the double-stranded RNAi agent could be determined to positively correlate to the relative hydrophobicity of the double-stranded RNAi agent, which could then positively correlate to the silencing activity of the double-stranded RNAi agent.

[0193] In one embodiment, the plasma protein binding assay determined is an electrophoretic mobility shift assay (EMSA) using human serum albumin protein. An exemplary protocol of this binding assay is illustrated in detail in, e.g., PCT Publication No. WO 2019/217459. The hydrophobicity of the double-stranded RNAi agent, measured by fraction of unbound siRNA in the binding assay, exceeds 0.15, exceeds 0.2, exceeds 0.25, exceeds 0.3, exceeds 0.35, exceeds 0.4, exceeds 0.45, or exceeds 0.5 for an enhanced in vivo delivery of siRNA.

[0194] Accordingly, conjugating the lipophilic moieties to the internal position(s) of the double-stranded RNAi agent provides optimal hydrophobicity for the enhanced in vivo delivery of siRNA.

[0195] The term “lipid nanoparticle” or “LNP” is a vesicle comprising a lipid layer encapsulating a pharmaceutically active molecule, such as a nucleic acid molecule, e.g., a RNAi agent or a plasmid from which a RNAi agent is transcribed. LNPs are described in, for example, U.S. Pat. Nos. 6,858,225, 6,815,432, 8,158,601, and 8,058,069, the entire contents of which are hereby incorporated herein by reference.

[0196] As used herein, a “subject” is an animal, such as a mammal, including a primate (such as a human, a non-human primate, e.g., a monkey, and a chimpanzee), or a non-primate (such as a a cow, a pig, a horse, a goat, a rabbit, a sheep, a hamster, a guinea pig, a cat, a dog, a rat, or a mouse), or a bird that expresses the target gene, either endogenously or heterologously. In one embodiment, the subject is a human, such as a human being treated or assessed for a disease, disorder, or condition that would benefit from reduction in SGLT2 expression; a human at risk for a disease, disorder, or condition that would benefit from reduction in SGLT2 expression; a human having a disease, disorder, or condition that would benefit from reduction in SGLT2 expression; or human being treated for a disease, disorder, or condition that would benefit from reduction in SGLT2 expression as described herein. In some embodiments, the subject is a female human. In other embodiments, the subject is a male human. In one embodiment, the subject is an adult subject. In another embodiment, the subject is a pediatric subject.

[0197] As used herein, the terms “treating” or “treatment” refer to a beneficial or desired result including, but not limited to, alleviation or amelioration of one or more signs or symptoms associated with SGLT2 expression or SGLT2 protein production, e.g., a SGLT2-associated disease, e.g., gout or diabetes, e.g., type II diabetes, or symptoms associated with unwanted SGLT2 expression; diminishing the extent of unwanted SGLT2 activation or stabilization; amelioration or palliation of unwanted SGLT2 activation or stabilization. “Treatment” can also mean prolonging survival as compared to expected survival in the absence of treatment.

[0198] The term “lower” in the context of the level of SGLT2 in a subject or a disease marker or symptom refers to a statistically significant decrease in such level. The decrease can be, for example, at least 10%, 15%, 20%, 25%, 30%, %, 40%, 45%, 50%, 55%, 60%, 65%, 70%, 75%, 80%, 85%, 90%, 95%, or more. In certain embodiments, a decrease is at least 20%. In certain embodiments, the decrease is at least 50% in a disease marker, e.g., protein or gene expression level. “Lower” in the context of the level of SGLT2 in a subject is a decrease to a level accepted as within the range of normal for an individual without such disorder. In certain embodiments, the expression of the target is normalized, i.e., decreased towards or to a level accepted as within the range of normal for an individual without such disorder, e.g., blood glucose level, blood uric acid level, blood lipid level, blood oxygen level, white blood cell count, kidney function, spleen function, liver function. For example, chronic hyperuricemia is defined as serum urate levels greater than 6.8 mg/dl (greater than 360 mmol/), the level above which the physiological saturation threshold is exceeded (Mandell, Cleve. Clin. Med. 75:S5-S8, 2008). As used here, “lower” in a subject can refer to lowering of gene expression or protein production in a cell in a subject does not require lowering of expression in all cells or tissues of a subject. For example, as used herein, lowering in a subject can include lowering of gene expression or protein production in a subject.

[0199] The term “lower” can also be used in association with normalizing a symptom of a disease or condition, i.e. decreasing the difference between a level in a subject suffering from a SGLT2-associated disease towards or to a level in a normal subject not suffering from a SGLT2-associated disease. As used herein, if a disease is associated with an elevated value for a symptom, “normal” is considered to be the upper limit of normal. If a disease is associated with a decreased value for a symptom, “normal” is considered to be the lower limit of normal.

[0200] As used herein, “prevention” or “preventing.” when used in reference to a disease, disorder, or condition thereof, that would benefit from a reduction in expression of a SGLT2 gene or production of a SGLT2 protein, refers to a reduction in the likelihood that a subject will develop a symptom associated with such a disease, disorder, or condition, e.g., a symptom of a SGLT2-associated disease, e.g., gout, or diabetes, e.g., type II diabetes. The failure to develop a disease, disorder, or condition, or the reduction in the development of a symptom associated with such a disease, disorder, or condition (e.g., by at least about 10% on a clinically accepted scale for that disease or disorder), or the exhibition of delayed symptoms delayed (e.g., by days, weeks, months or years), or the reduction or maintenance of a serum uric acid level at 6.8 mg/dl or less in a subject prone to elevated serum uric acid is considered effective prevention.

[0201] As used herein, the term “SGLT2-associated disease,” is a disease or disorder that would benefit from reduction in the expression or activity of SGLT2. The term “SGLT2-associated disease,” is a disease or disorder that is caused by, or associated with, SGLT2 expression or SGLT2 protein production. The term “SGLT2-associated disease” includes a disease, disorder or condition that would benefit from a decrease in SGLT2 expression or SGLT2 protein activity. For example, as described above and in the working examols of the application, SGLT2 inhibitors, used to treat Type 2 diabetes or hyperglycemia, reduce serum glucose levels and lower serum uric acid levels, and predicted loss-of-function and predicted missense variants of SGLT2 are significantly associated with the decreased levels of urate and suggestively associated with decreased diagnosis of gout (see, Example 3). Thus, “SGLT2-associated diseases” are those diseased associated with relevated levels of serum glucose and/or serum urate. Non-limiting examples of SGLT2-associated diseases include, for example, gout, diabetes (type I or type II diabetes), or other metabolic diseases.

[0202] As used herein, “gout” refers to a type of arthritis that causes intense pain, swelling, and stiffness in a joint, most often in the big toe. Gout occurs when uric acid or urate crystals accumulate in the joint or surrounding tissue, causing the inflammation and intense pain of a gout attack. Urate crystals can form when there are high levels of uric acid in the blood. Gout can be diagnosed by a joint fluid test, where fluid is extracted from the affected joint with a needle in order to examinate if any urate crystals are present, or by a blood test to measure the levels of uric acid in the blood. An ultrasound scan can also be performed to detect urate crystals around joints. Currently available treatments for gout are contraindicated or ineffective in a number of subjects. Allopurinol, a common first line treatment to reduce uric acid levels in subjects with gout, is contraindicated in a number of populations, especially those with compromised renal function. Further, a number of subjects fail treatment with allopurinol, e.g., subjects who suffer gout flares despite treatment, or subjects who suffer from rashes or hypersensitivity reactions associated with allopurinol.

[0203] As used herein, a “metabolic disease” refers to any disease or disorder that disrupts normal metabolism, the process of converting food to energy on a cellular level. Metabolic diseases affect the ability of the cell to perform critical biochemical reactions that involve the processing or transport of proteins (amino acids), carbohydrates (sugars and starches), or lipids (fatty acids). Non-limiting examples of metabolic diseases include disorders of carbohydrates, e.g., diabetes, type I diabetes, type II diabetes, galactosemia, hereditary fructose intolerance, fructose 1,6-diphosphatase deficiency, glycogen storage disorders, congenital disorders of glycosylation, insulin resistance, insulin insufficiency, hyperinsulinemia, impaired glucose tolerance (IGT), abnormal glycogen metabolism; disorders of amino acid metabolism, e.g., maple syrup urine discase (MSUD), or homocystinuria; disorder of organic acid metabolism, e.g.,methylmalonic aciduria, 3-methylglutaconic aciduria-Barth syndrome, glutaric aciduria or 2-hydroxyglutaric aciduria—D and L forms; disorders of fatty acid beta-oxidation, e.g., medium-chain acyl-CoA dehydrogenase deficiency (MCAD), long-chain 3-hydroxyacyl-CoA dehydrogenase deficiency (LCHAD), very-long-chain acyl-CoA dehydrogenase deficiency (VLCAD); disorders of lipid metabolism, e.g., GM1 Gangliosidosis, Tay-Sachs Discase, Sandhoff Disease, Fabry Disease, Gaucher Disease, Niemann-Pick Disease, Krabbe Discase, Mucolipidoses, or Mucopolysaccharidoses; mitochondrial disorders, e.g., mitochondrial cardiomyopathies; Leigh disease; mitochondrial encephalopathy, lactic acidosis, and stroke-like episodes (MELAS); myoclonic epilepsy with ragged-red fibers (MERRF); neuropathy, ataxia, and retinitis pigmentosa (NARP); Barth syndrome; or peroxisomal disorders, e.g., Zellweger Syndrome (cerebrohepatorenal syndrome), X-Linked Adrenoleukodystrophy or Refsum Disease.

[0204] As used herein, the term “diabetes” refers to a group of metabolic diseases characterized by high blood sugar (glucose) levels which result from defects in insulin secretion or action, or both. There are two most common types of diabetes, namely type 1 diabetes and type 2 diabetes, which both result from the body's inability to regulate insulin. Insulin is a hormone released by the pancreas in response to increased levels of blood sugar (glucose) in the blood.

[0205] The term “type I diabetes,” as used herein, refers to a chronic disease that occurs when the pancreas produces too little insulin to regulate blood sugar levels appropriately. Type I diabetes is also referred to as insulin-dependent diabetes mellitus, IDDM, and juvenile onset diabetes. People with type I diabetes (insulin-dependent diabetes) produce little or no insulin at all. Although about 6 percent of the United States population has some form of diabetes, only about 10 percent of all diabetics have type I disorder. Most people who have type I diabetes developed the disorder before age 30. Type 1 diabetes represents the result of a progressive autoimmune destruction of the pancreatic β-cells with subsequent insulin deficiency. More than 90 percent of the insulin-producing cells (beta cells) of the pancreas are permanently destroyed. The resulting insulin deficiency is severe, and to survive, a person with type I diabetes must regularly inject insulin.

[0206] In type II diabetes (also referred to as noninsulin-dependent diabetes mellitus, NDDM), the pancreas continues to manufacture insulin, sometimes even at higher than normal levels. However, the body develops resistance to its effects, resulting in a relative insulin deficiency. Type II diabetes may occur in children and adolescents but usually begins after age 30 and becomes progressively more common with age: about 15 percent of people over age 70 have type II diabetes. Obesity is a risk factor for type II diabetes, and 80 to 90 percent of the people with this disorder are obese.

[0207] In some embodiments, diabetes includes pre-diabetes. “Pre-diabetes” refers to one or more carly diabetic conditions including impaired glucose utilization, abnormal or impaired fasting glucose levels, impaired glucose tolerance, impaired insulin sensitivity and insulin resistance. Prediabetes is a major risk factor for the development of type 2 diabetes mellitus, cardiovascular disease and mortality. Much focus has been given to developing therapeutic interventions that prevent the development of type 2 diabetes by effectively treating prediabetes.

[0208] Diabetes can be diagnosed by the administration of a glucose tolerance test. Clinically, diabetes is often divided into several basic categories. Primary examples of these categories include. autoimmune diabetes mellitus, non-insulin-dependent diabetes mellitus (type 1 NDDM), insulin-dependent diabetes mellitus (type 2 IDDM), non-autoimmune diabetes mellitus, non-insulin-dependent diabetes mellitus (type 2 NIDDM), and maturity-onset diabetes of the young (MODY). A further category, often referred to as secondary, refers to diabetes brought about by some identifiable condition which causes or allows a diabetic syndrome to develop. Examples of secondary categories include, diabetes caused by pancreatic disease, hormonal abnormalities, drug- or chemical-induced diabetes, diabetes caused by insulin receptor abnormalities, diabetes associated with genetic syndromes, and diabetes of other causes. (see e.g., Harrison's (1996) 14th ed., New York, McGraw-Hill).

[0209] As used herein, a “lipid metabolism disorder” or “disorder of lipid metabolism” refers to any disorder associated with or caused by a disturbance in lipid metabolism. This term also includes any disorder, disease or condition that can lead to hyperlipidemia, or condition characterized by abnormal clevation of levels of any or all lipids and/or lipoproteins in the blood. This term refers to an inherited disorder, such as familial hypertriglyceridemia, familial partial lipodystrophy type 1 (FPLD1), or an induced or acquired disorder, such as a disorder induced or acquired as a result of a disease, disorder or condition (e.g., renal failure), a diet, or intake of certain drugs (e.g., as a result of highly active antiretroviral therapy (HAART) used for treating, e.g., AIDS or HIV).

[0210] Additional examples of disorders of lipid metabolism include, but are not limited to, atherosclerosis, dyslipidemia, hypertriglyceridemia (including drug-induced hypertriglyceridemia, diuretic-induced hypertriglyceridemia, alcohol-induced hypertriglyceridemia, β-adrenergic blocking agent-induced hypertriglyceridemia, estrogen-induced hypertriglyceridemia, glucocorticoid-induced hypertriglyceridemia, retinoid-induced hypertriglyceridemia, cimetidine-induced hypertriglyceridemia, and familial hypertriglyceridemia), acute pancreatitis associated with hypertriglyceridemia, chylomicron syndrom, familial chylomicronemia, Apo-E deficiency or resistance, LPL deficiency or hypoactivity, hyperlipidemia (including familial combined hyperlipidemia), hypercholesterolemia, gout associated with hypercholesterolemia, xanthomatosis (subcutaneous cholesterol deposits), hyperlipidemia with heterogeneous LPL deficiency, hyperlipidemia with high LDL and heterogeneous LPL deficiency, fatty liver disease, or non-alcoholic stetohepatitis (NASH).

[0211] Cardiovascular diseases are also considered “metabolic disorders”, as defined herein. These diseases may include coronary artery disease (also called ischemic heart disease), hypertension, inflammation associated with coronary artery disease, restenosis, peripheral vascular diseases, and stroke.

[0212] Disorders related to body weight are also considered “metabolic disorders”, as defined herein. Such disorders may include obesity, metabolic syndrome including independent components of metabolic syndrome (e.g., central obesity, FBG/pre-diabetes/diabetes, hypercholesterolemia, hypertriglyceridemia, and hypertension), hypo-metabolic states, hypothyroidism, uremia, and other conditions associated with weight gain (including rapid weight gain), weight loss, maintenance of weight loss, or risk of weight regain following weight loss.

[0213] Blood sugar disorders are further considered “metabolic disorders”, as defined herein. Such disorders may include diabetes, hypertension, and polycystic ovarian syndrome related to insulin resistance. Other exemplary disorders of metabolic disorders may also include renal transplantation, nephrotic syndrome, Cushing's syndrome, acromegaly, systemic lupus erythematosus, dysglobulinemia, lipodystrophy, glycogenosis type I, and Addison's disease.

[0214] Additional diseases or conditions related to metabolic disorders that would be apparent to the skilled artisan and are within the scope of this disclosure.

[0215] The symptoms for a SGLT2-associated disease, e.g., gout or diabetes, include, for example, insulin resistance, lack of ability to regulate blood sugar, high blood uric acid level, a loss of fat-free or lean muscle mass, an excess of fat mass, a lower metabolic rate, weight gain, and/or increase in body mass index. Further details regarding signs and symptoms of the various diseases or conditions are provided herein and are well known in the art.

[0216] “Therapeutically effective amount,” as used herein, is intended to include the amount of an RNAi agent that, when administered to a subject having a SGLT2-associated disease, is sufficient to effect treatment of the disease (e.g., by diminishing, ameliorating, or maintaining the existing disease or one or more symptoms of disease). The “therapeutically effective amount” may vary depending on the RNAi agent, how the agent is administered, the disease and its severity and the history, age, weight, family history, genetic makeup, the types of preceding or concomitant treatments, if any, and other individual characteristics of the subject to be treated.

[0217] “Prophylactically effective amount,” as used herein, is intended to include the amount of a RNAi agent that, when administered to a subject having a SGLT2-associated disorder, e.g., gout or diabetes, is sufficient to prevent or ameliorate the disease or one or more symptoms of the disease. Ameliorating the disease includes slowing the course of the disease or reducing the severity of later-developing disease. The “prophylactically effective amount” may vary depending on the RNAi agent. how the agent is administered, the degree of risk of disease, and the history, age, weight, family history, genetic makeup, the types of preceding or concomitant treatments, if any, and other individual characteristics of the patient to be treated.

[0218] A “therapeutically-effective amount” or “prophylacticaly effective amount” also includes an amount of a RNAi agent that produces some desired local or systemic effect at a reasonable benefit/risk ratio applicable to any treatment. A RNAi agent employed in the methods of the present disclosure may be administered in a sufficient amount to produce a reasonable benefit/risk ratio applicable to such treatment.

[0219] The phrase “pharmaceutically acceptable” is employed herein to refer to those compounds, materials (including salts), compositions, or dosage forms which are, within the scope of sound medical judgment, suitable for use in contact with the tissues of human subjects and animal subjects without excessive toxicity, irritation, allergic response, or other problem or complication, commensurate with a reasonable benefit/risk ratio.

[0220] The phrase “pharmaceutically-acceptable carrier” as used herein means a pharmaceutically-acceptable material, composition or vehicle, such as a liquid or solid filler, diluent, excipient, manufacturing aid (e.g., lubricant, talc magnesium, calcium or zinc stearate, or steric acid), or solvent encapsulating material, involved in carrying or transporting the subject compound from one organ, or portion of the body, to another organ, or portion of the body. Each carrier must be “acceptable” in the sense of being compatible with the other ingredients of the formulation and not injurious to the subject being treated. Some examples of materials which can serve as pharmaceutically-acceptable carriers include: (1) sugars, such as lactose, glucose and sucrose; (2) starches, such as corn starch and potato starch; (3) cellulose, and its derivatives, such as sodium carboxymethyl cellulose, ethyl cellulose and cellulose acetate; (4) powdered tragacanth; (5) malt; (6) gelatin; (7) lubricating agents, such as magnesium state, sodium lauryl sulfate and talc; (8) excipients, such as cocoa butter and suppository waxes; (9) oils, such as peanut oil, cottonseed oil, safflower oil, sesame oil, olive oil, corn oil and soybean oil; (10) glycols, such as propylene glycol; (11) polyols, such as glycerin, sorbitol, mannitol and polyethylene glycol; (12) esters, such as ethyl oleate and ethyl laurate; (13) agar; (14) buffering agents, such as magnesium hydroxide and aluminum hydroxide; (15) alginic acid; (16) pyrogen-free water; (17) isotonic saline; (18) Ringer's solution; (19) ethyl alcohol; (20) pH buffered solutions; (21) polyesters, polycarbonates or polyanhydrides; (22) bulking agents, such as polypeptides and amino acids (23) serum component, such as serum albumin, HDL and LDL; and (22) other non-toxic compatible substances employed in pharmaceutical formulations. Pharmaceutically acceptable carriers for pulmonary delivery are known in the art and will vary depending on the desired location for deposition of the agent, e.g., upper or lower respiratory system, and the type of device to be used for delivery, e.g., sprayer, nebulizer, dry powder inhaler.

[0221] The term “sample,” as used herein, includes a collection of similar fluids, cells, or tissues isolated from a subject, as well as fluids, cells, or tissues present within a subject. Examples of biological fluids include blood, serum and serosal fluids, plasma, bronchial fluids, sputum, cerebrospinal fluid, ocular fluids, lymph, urine, saliva, sputum, and the like. Tissue samples may include samples from tissues, organs or localized regions. For example, samples may be derived from particular organs, parts of organs, or fluids or cells within those organs.

### II. RNAi Agents of the Disclosure

[0222] Described herein are RNAi agents which inhibit the expression of a SGLT2 gene. In one embodiment, the RNAi agent includes double stranded ribonucleic acid (dsRNA) molecules for inhibiting the expression of a SGLT2 gene in a cell, such as a cell within a subject, e.g., a mammal, such as a human, e.g., a subject having a SGLT2-associated disorder, e.g., gout or diabetes, or a subject at risk of a SGLT2-associated disease.

[0223] The dsRNA includes an antisense strand having a region of complementarity which is complementary to at least a part of a target RNA, e.g., an mRNA formed in the expression of a SGLT2 gene. The region of complementarity is about 15-30 nucleotides or less in length. Upon contact with a cell expressing the SGLT2 gene, the RNAi agent inhibits the expression of the SGLT2 gene (e.g., a human gene, a primate gene, a non-primate gene) by at least 50% as assayed by, for example, a PCR or branched DNA (bDNA)-based method, or by a protein-based method, such as by immunofluorescence analysis, using, for example, western blotting or flowcytometric techniques. In certain embodiments, inhibition of expression is by at least 50% as assayed by the Dual-Glo lucifierase assay in Example 1 where the siRNA is at a 10 nM concentration.

[0224] A dsRNA includes two RNA strands that are complementary and hybridize to form a duplex structure under conditions in which the dsRNA will be used. One strand of a dsRNA (the antisense strand) includes a region of complementarity that is substantially complementary, and generally fully complementary, to a target sequence. For example, the target sequence can be derived from the sequence of an mRNA formed during the expression of a SGLT2 gene. The other strand (the sense strand) includes a region that is complementary to the antisense strand, such that the two strands hybridize and form a duplex structure when combined under suitable conditions. As described elsewhere herein and as known in the art, the complementary sequences of a dsRNA can also be contained as self-complementary regions of a single nucleic acid molecule, as opposed to being on separate oligonucleotides.

[0225] Generally, the duplex structure is 15 to 30 base pairs in length, e.g., 15-29, 15-28, 15-27, 15-26, 15-25, 15-24, 15-23, 15-22, 15-21, 15-20, 15-19, 15-18, 15-17, 18-30, 18-29, 18-28, 18-27, 18-26, 18-25, 18-24, 18-23, 18-22, 18-21, 18-20, 19-30, 19-29, 19-28, 19-27, 19-26, 19-25, 19-24, 19-23, 19-22, 19-21, 19-20, 20-30, 20-29, 20-28, 20-27, 20-26, 20-25, 20-24, 20-23, 20-22, 20-21, 21-30, 21-29, 21-28, 21-27, 21-26, 21-25, 21-24, 21-23, or 21-22 base pairs in length. In certain embodiments, the duplex structure is 18 to 25 base pairs in length, e.g., 18-25, 18-24, 18-23, 18-22, 18-21, 18-20, 19-25, 19-24, 19-23, 19-22, 19-21, 19-20, 20-25, 20-24, 20-23, 20-22, 20-21, 21-25, 21-24, 21-23, 21-22, 22-25, 22-24, 22-23, 23-25, 23-24 or 24-25 base pairs in length, for example, 19-21 basepairs in length. Ranges and lengths intermediate to the above recited ranges and lengths are also contemplated to be part of the disclosure.

[0226] Similarly, the region of complementarity to the target sequence is 15 to 30 nucleotides in length, e.g., 15-29, 15-28, 15-27, 15-26, 15-25, 15-24, 15-23, 15-22, 15-21, 15-20, 15-19, 15-18, 15-17, 18-30, 18-29, 18-28, 18-27, 18-26, 18-25, 18-24, 18-23, 18-22, 18-21, 18-20, 19-30, 19-29, 19-28, 19-27, 19-26, 19-25, 19-24, 19-23, 19-22, 19-21, 19-20, 20-30, 20-29, 20-28, 20-27, 20-26, 20-25, 20-24, 20-23, 20-22, 20-21, 21-30, 21-29, 21-28, 21-27, 21-26, 21-25, 21-24, 21-23, or 21-22 nucleotides in length, for example 19-23 nucleotides in length or 21-23 nucleotides in length. Ranges and lengths intermediate to the above recited ranges and lengths are also contemplated to be part of the disclosure.

[0227] In some embodiments, the dsRNA is 15 to 23 nucleotides in length, or 25 to 30 nucleotides in length. In general, the dsRNA is long enough to serve as a substrate for the Dicer enzyme. For example, it is well known in the art that dsRNAs longer than about 21-23 nucleotides can serve as substrates for Dicer. As the ordinarily skilled person will also recognize, the region of an RNA targeted for cleavage will most often be part of a larger RNA molecule, often an mRNA molecule. Where relevant, a “part” of an mRNA target is a contiguous sequence of an mRNA target of sufficient length to allow it to be a substrate for RNAi-directed cleavage (i.e., cleavage through a RISC pathway).

[0228] One of skill in the art will also recognize that the duplex region is a primary functional portion of a dsRNA, e.g., a duplex region of about 15 to 36 base pairs, e.g., 15-36, 15-35, 15-34, 15-33, 15-32, 15-31, 15-30, 15-29, 15-28, 15-27, 15-26, 15-25, 15-24, 15-23, 15-22, 15-21, 15-20, 15-19, 15-18, 15-17, 18-30, 18-29, 18-28, 18-27, 18-26, 18-25, 18-24, 18-23, 18-22, 18-21, 18-20, 19-30, 19-29, 19-28, 19-27, 19-26, 19-25, 19-24, 19-23, 19-22, 19-21, 19-20, 20-30, 20-29, 20-28, 20-27, 20-26, 20-25, 20-24, 20-23, 20-22, 20-21, 21-30, 21-29, 21-28, 21-27, 21-26, 21-25, 21-24, 21-23, or 21-22 base pairs, for example, 19-21 base pairs. Thus, in one embodiment, to the extent that it becomes processed to a functional duplex, of e.g., 15-30 base pairs, that targets a desired RNA for cleavage, an RNA molecule or complex of RNA molecules having a duplex region greater than 30 base pairs is a dsRNA. Thus, an ordinarily skilled artisan will recognize that in one embodiment, a miRNA is a dsRNA. In another embodiment, a dsRNA is not a naturally occurring miRNA. In another embodiment, a RNAi agent useful to target SGLT2 expression is not generated in the target cell by cleavage of a larger dsRNA.

[0229] A dsRNA as described herein can further include one or more single-stranded nucleotide overhangs e.g., 1, 2, 3, or 4 nucleotides. A nucleotide overhang can comprise or consist of a nucleotide/nucleoside analog, including a deoxynucleotide/nucleoside. The overhang(s) can be on the sense strand, the antisense strand or any combination thereof. Furthermore, the nucleotide(s) of an overhang can be present on the 5′-end, 3′-end or both ends of either an antisense or sense strand of a dsRNA. In certain embodiments, longer, extended overhangs are possible.

[0230] A dsRNA can be synthesized by standard methods known in the art as further discussed below, e.g., by use of an automated DNA synthesizer, such as are commercially available from, for example, Biosearch, Applied Biosystems, Inc.

[0231] iRNA compounds of the invention may be prepared using a two-step procedure. First, the individual strands of the double stranded RNA molecule are prepared separately. Then, the component strands are annealed. The individual strands of the siRNA compound can be prepared using solution-phase or solid-phase organic synthesis or both. Organic synthesis offers the advantage that the oligonucleotide strands comprising unnatural or modified nucleotides can be easily prepared. Single-stranded oligonucleotides of the invention can be prepared using solution-phase or solid-phase organic synthesis or both.

[0232] An siRNA can be produced, e.g., in bulk, by a variety of methods. Exemplary methods include: organic synthesis and RNA cleavage, e.g., in vitro cleavage.

[0233] An siRNA can be made by separately synthesizing a single stranded RNA molecule, or each respective strand of a double-stranded RNA molecule, after which the component strands can then be annealed.

[0234] A large bioreactor, e.g., the OligoPilot II from Pharmacia Biotec AB (Uppsala Sweden), can be used to produce a large amount of a particular RNA strand for a given siRNA. The OligoPilotII reactor can efficiently couple a nucleotide using only a 1.5 molar excess of a phosphoramidite nucleotide. To make an RNA strand, ribonucleotides amidites are used. Standard cycles of monomer addition can be used to synthesize the 21 to 23 nucleotide strand for the siRNA. Typically, the two complementary strands are produced separately and then annealed, e.g., after release from the solid support and deprotection.

[0235] Organic synthesis can be used to produce a discrete siRNA species. The complementary of the species to a SGLT2 gene can be precisely specified. For example, the species may be complementary to a region that includes a polymorphism, e.g., a single nucleotide polymorphism. Further the location of the polymorphism can be precisely defined. In some embodiments, the polymorphism is located in an internal region, e.g., at least 4, 5, 7, or 9 nucleotides from one or both of the termini.

[0236] In one embodiment, RNA generated is carefully purified to remove endsiRNA is cleaved in vitro into siRNAs, for example, using a Dicer or comparable RNAse III-based activity. For example, the dsiRNA can be incubated in an in vitro extract from Drosophila or using purified components, e.g., a purified RNAse or RISC complex (RNA-induced silencing complex). See, e.g., Ketting et al. Genes Dev 2001 Oct 15;15(20):2654-9 and Hammond Science 2001 Aug 10;293(5532):1146-50.

[0237] dsiRNA cleavage generally produces a plurality of siRNA species, each being a particular 21 to 23 nucleotide fragment of a source dsiRNA molecule. For example, siRNAs that include sequences complementary to overlapping regions and adjacent regions of a source dsiRNA molecule may be present.

[0238] Regardless of the method of synthesis, the siRNA preparation can be prepared in a solution (e.g., an aqueous or organic solution) that is appropriate for formulation. For example, the siRNA preparation can be precipitated and redissolved in pure double-distilled water, and lyophilized. The dried siRNA can then be resuspended in a solution appropriate for the intended formulation process.

[0239] In one aspect, a dsRNA of the disclosure includes at least two nucleotide sequences, a sense sequence and an antisense sequence. The sense strand sequence for SGLT2 may be selected from the group of sequences provided in any one of Tables 2-3, and the corresponding nucleotide sequence of the antisense strand of the sense strand may be selected from the group of sequences of any one of Tables 2-3. In this aspect, one of the two sequences is complementary to the other of the two sequences, with one of the sequences being substantially complementary to a sequence of an mRNA generated in the expression of a SGLT2 gene. As such, in this aspect, a dsRNA will include two oligonucleotides, where one oligonucleotide is described as the sense strand (passenger strand) in any one of Tables 2-3, and the second oligonucleotide is described as the corresponding antisense strand (guide strand) of the sense strand in any one of Tables 2-3 for SGLT2.

[0240] In one embodiment, the substantially complementary sequences of the dsRNA are contained on separate oligonucleotides. In another embodiment, the substantially complementary sequences of the dsRNA are contained on a single oligonucleotide.

[0241] It will be understood that, although the sequences provided herein are described as modified or conjugated sequences, the RNA of the RNAi agent of the disclosure e.g., a dsRNA of the disclosure, may comprise any one of the sequences set forth in any one of Tables 2-3 that is un-modified, un-conjugated, or modified or conjugated differently than described therein. One or more lipophilic ligands or one or more GalNAc ligands can be included in any of the positions of the RNAi agents provided in the instant application.

[0242] The skilled person is well aware that dsRNAs having a duplex structure of about 20 to 23 base pairs, e.g., 21, base pairs have been hailed as particularly effective in inducing RNA interference (Elbashir et al., (2001) EMBO J., 20:6877-6888). However, others have found that shorter or longer RNA duplex structures can also be effective (Chu and Rana (2007) RNA 14:1714-1719; Kim et al. (2005) Nat Biotech 23:222-226). In the embodiments described above, by virtue of the nature of the oligonucleotide sequences provided herein, dsRNAs described herein can include at least one strand of a length of minimally 21 nucleotides. It can be reasonably expected that shorter duplexes minus only a few nucleotides on one or both ends can be similarly effective as compared to the dsRNAs described above. Hence, dsRNAs having a sequence of at least 15, 16, 17, 18, 19, 20, or more contiguous nucleotides derived from one of the sequences provided herein, and differing in their ability to inhibit the expression of a SGLT2 gene by not more than 10, 15, 20, 25, or 30% inhibition from a dsRNA comprising the full sequence using the in vitro assay with Cos7 and a 10 nM concentration of the RNA agent and the PCR assay as provided in the examples herein, are contemplated to be within the scope of the present disclosure.

[0243] In addition, the RNAs described herein identify a site(s) in a SGLT2 transcript that is susceptible to RISC-mediated cleavage. As such, the present disclosure further features RNAi agents that target within this site(s). As used herein, a RNAi agent is said to target within a particular site of an RNA transcript if the RNAi agent promotes cleavage of the transcript anywhere within that particular site. Such a RNAi agent will generally include at least about 15 contiguous nucleotides, such as at least 19 nucleotides, from one of the sequences provided herein coupled to additional nucleotide sequences taken from the region contiguous to the selected sequence in a SGLT2 gene.

[0244] An RNAi agent as described herein can contain one or more mismatches to the target sequence. In one embodiment, an RNAi agent as described herein contains no more than 3 mismatches (i.e., 3, 2, 1, or 0 mismatches). In one embodiment, an RNAi agent as described herein contains no more than 2 mismatches. In one embodiment, an RNAi agent as described herein contains no more than 1 mismatch. In one embodiment, an RNAi agent as described herein contains 0 mismatches. In certain embodiments, if the antisense strand of the RNAi agent contains mismatches to the target sequence, the mismatch can optionally be restricted to be within the last 5 nucleotides from either the 5′- or 3′-end of the region of complementarity. For example, in such embodiments, for a 23 nucleotide RNAi agent, the strand which is complementary to a region of a SGLT2 gene generally does not contain any mismatch within the central 13 nucleotides. The methods described herein or methods known in the art can be used to determine whether an RNAi agent containing a mismatch to a target sequence is effective in inhibiting the expression of a SGLT2 gene. Consideration of the efficacy of RNAi agents with mismatches in inhibiting expression of a SGLT2 gene is important, especially if the particular region of complementarity in a SGLT2 gene is known to mutate.

### III. Modified RNAi Agents of the Disclosure

[0245] In one embodiment, the RNA of the RNAi agent of the disclosure e.g., a dsRNA, is un-modified, and does not comprise, e.g., chemical modifications or conjugations known in the art and described herein. In certain embodiments, the RNA of an RNAi agent of the disclosure, e.g., a dsRNA, is chemically modified to enhance stability or other beneficial characteristics. In certain embodiments of the disclosure, substantially all of the nucleotides of an RNAi agent of the disclosure are modified. In other embodiments of the disclosure, all of the nucleotides of an RNAi agent of the disclosure are modified. RNAi agents of the disclosure in which “substantially all of the nucleotides are modified” are largely but not wholly modified and can include not more than 5, 4, 3, 2, or 1 unmodified nucleotides. In still other embodiments of the disclosure, RNAi agents of the disclosure can include not more than 5, 4, 3, 2 or 1 modified nucleotides.

[0246] The nucleic acids featured in the disclosure can be synthesized or modified by methods well established in the art, such as those described in “Current protocols in nucleic acid chemistry.” Beaucage, S.L. et al. (Edrs.), John Wiley & Sons, Inc., New York, NY, USA, which is hereby incorporated herein by reference. Modifications include, for example, end modifications, e.g., 5′-end modifications (phosphorylation, conjugation, inverted linkages) or 3′-end modifications (conjugation, DNA nucleotides, inverted linkages, etc.); base modifications, e.g., replacement with stabilizing bases, destabilizing bases, or bases that base pair with an expanded repertoire of partners, removal of bases (abasic nucleotides), or conjugated bases; sugar modifications (e.g., at the 2′-position or 4′-position) or replacement of the sugar; or backbone modifications, including modification or replacement of the phosphodiester linkages. Specific examples of RNAi agents useful in the embodiments described herein include, but are not limited to, RNAs containing modified backbones or no natural internucleoside linkages. RNAs having modified backbones include, among others, those that do not have a phosphorus atom in the backbone. For the purposes of this specification, and as sometimes referenced in the art, modified RNAs that do not have a phosphorus atom in their internucleoside backbone can also be considered to be oligonucleosides. In some embodiments, a modified RNAi agent will have a phosphorus atom in its internucleoside backbone.

[0247] Modified RNA backbones include, for example, phosphorothioates, chiral phosphorothioates, phosphorodithioates, phosphotriesters, aminoalkylphosphotriesters, methyl and other alkyl phosphonates including 3′-alkylene phosphonates and chiral phosphonates, phosphinates, phosphoramidates including 3′-amino phosphoramidate and aminoalkylphosphoramidates, thionophosphoramidates, thionoalkylphosphonates, thionoalkylphosphotriesters, and boranophosphates having normal 3′-5′ linkages, 2′-5′-linked analogs of these, and those having inverted polarity wherein the adjacent pairs of nucleoside units are linked 3′-5′ to 5′-3′ or 2′-5′ to 5′-2′. Various salts, e.g., sodium salts, mixed salts and free acid forms are also included.

[0248] Representative U.S. patents that teach the preparation of the above phosphorus-containing linkages include, but are not limited to, U.S. Pat. Nos. 3,687,808; 4,469,863; 4,476,301; 5,023,243; 5,177,195; 5,188,897; 5,264,423; 5,276,019; 5,278,302; 5,286,717; 5,321,131; 5,399,676; 5,405,939; 5,453,496; 5,455,233; 5,466,677; 5,476,925; 5,519,126; 5,536,821; 5,541,316; 5,550,111; 5,563,253; 5,571,799; 5,587,361; 5,625,050; 6,028,188; 6,124,445; 6,160,109; 6,169,170; 6,172,209; 6,239,265; 6,277,603; 6,326,199; 6,346,614; 6,444,423; 6,531,590; 6,534,639; 6,608,035; 6,683,167; 6,858,715; 6,867,294; 6,878,805; 7,015,315; 7,041,816; 7,273,933; 7,321,029; and U.S. Pat. No. RE39464, the entire contents of each of which are hereby incorporated herein by reference.

[0249] Modified RNA backbones that do not include a phosphorus atom therein have backbones that are formed by short chain alkyl or cycloalkyl internucleoside linkages, mixed heteroatoms and alkyl or cycloalkyl internucleoside linkages, or one or more short chain heteroatomic or heterocyclic internucleoside linkages. These include those having morpholino linkages (formed in part from the sugar portion of a nucleoside); siloxane backbones; sulfide, sulfoxide and sulfone backbones; formacetyl and thioformacetyl backbones; methylene formacetyl and thioformacetyl backbones; alkene containing backbones; sulfamate backbones; methyleneimino and methylenehydrazino backbones; sulfonate and sulfonamide backbones; amide backbones; and others having mixed N, O, S and CH₂ component parts.

[0250] Representative U.S. patents that teach the preparation of the above oligonucleosides include, but are not limited to, U.S. Pat. Nos. 5,034,506; 5,166,315; 5,185,444; 5,214,134; 5,216,141; 5,235,033; 5,64,562; 5,264,564; 5,405,938; 5,434,257; 5,466,677; 5,470,967; 5,489,677; 5,541,307; 5,561,225; 5,596,086; 5,602,240; 5,608,046; 5,610,289; 5,618,704; 5,623,070; 5,663,312; 5,633,360; 5,677,437; and, 5,677,439, the entire contents of each of which are hereby incorporated herein by reference.

[0251] In other embodiments, suitable RNA mimetics are contemplated for use in RNAi agents, in which both the sugar and the internucleoside linkage, i.e., the backbone, of the nucleotide units are replaced with novel groups. The base units are maintained for hybridization with an appropriate nucleic acid target compound. One such oligomeric compound, an RNA mimetic that has been shown to have excellent hybridization properties, is referred to as a peptide nucleic acid (PNA). In PNA compounds, the sugar backbone of an RNA is replaced with an amide containing backbone, in particular an aminoethylglycine backbone. The nucleobases are retained and are bound directly or indirectly to aza nitrogen atoms of the amide portion of the backbone. Representative U.S. patents that teach the preparation of PNA compounds include, but are not limited to, U.S. Pat. Nos. 5,539,082; 5,714,331; and 5,719,262, the entire contents of each of which are hereby incorporated herein by reference. Additional PNA compounds suitable for use in the RNAi agents of the disclosure are described in, for example, in Nielsen et al., Science, 1991, 254, 1497-1500.

[0252] Some embodiments featured in the disclosure include RNAs with phosphorothioate backbones and oligonucleosides with heteroatom backbones, and in particular —CH₂—NH —CH₂—, —CH₂—N(CH₃)—O—CH₂—[known as a methylene (methylimino) or MMI backbone], —CH₂—O—N(CH₃) —CH₂—, —CH₂—N(CH₃)—N(CH₃)—CH₂— and —N(CH₃)—CH₂—CH₂— of the above-referenced U.S. Pat. No. 5.489,677, and the amide backbones of the above-referenced U.S. Pat. No. 5,602,240. In some embodiments, the RNAs featured herein have morpholino backbone structures of the above-referenced U.S. Pat. No. 5,034,506. The native phosphodiester backbone can be represented as O—P(O)(OH)—OCH₂—.

[0253] Modified RNAs can also contain one or more substituted sugar moieties. The RNAi agents, e.g., dsRNAs, featured herein can include one of the following at the 2′-position: OH; F; O-, S-, or N-alkyl; O-, S-, or N-alkenyl; O-, S- or N-alkynyl; or O-alkyl-O-alkyl, wherein the alkyl, alkenyl and alkynyl can be substituted or unsubstituted C₁ to C₁₀ alkyl or C₂ to C₁₀ alkenyl and alkynyl. Exemplary suitable modifications include O[(CH₂)ₙ O]ₘCH₃, O(CH₂)_{·n}OCH₃, O(CH₂)ₙNH₂, O(CH₂) ₙCH₃, O(CH₂)ₙONH₂, and O(CH₂)ₙON[(CH₂)ₙCH₃)]₂, where n and m are from 1 to about 10. In other embodiments, dsRNAs include one of the following at the 2′ position: C₁ to C₁₀ lower alkyl, substituted lower alkyl, alkaryl, aralkyl, O-alkaryl or O-aralkyl, SH, SCH₃, OCN, Cl, Br, CN, CF₃, OCF₃, SOCH₃, SO₂CH₃, ONO₂, NO₂, N₃, NH₂, heterocycloalkyl, heterocycloalkaryl, aminoalkylamino, polyalkylamino, substituted silyl, an RNA cleaving group, a reporter group, an intercalator, a group for improving the pharmacokinetic properties of a RNAi agent, or a group for improving the pharmacodynamic properties of a RNAi agent, and other substituents having similar properties. In some embodiments, the modification includes a 2′-methoxyethoxy (2′-O—CH₂CH₂OCH₃, also known as 2′-O-(2-methoxyethyl) or 2′-MOE) (Martin et al., Helv. Chim. Acta, 1995, 78:486-504) i.e., an alkoxy-alkoxy group. Another exemplary modification is 2′-dimethylaminooxyethoxy, i.e., a O(CH₂)₂ON(CH₃)₂ group, also known as 2′-DMAOE, as described in examples herein below, and 2′-dimethylaminoethoxyethoxy (also known in the art as 2′-O-dimethylaminoethoxyethyl or 2′-DMAEOE), i.e., 2′-O —CH₂—O —CH₂—N(CH₃)₂. Further exemplary modifications include: 5′-Me-2′-F nucleotides, 5′-Me-2′-OMe nucleotides, 5′-Me-2′-deoxynucleotides, (both R and S isomers in these three families); 2′-alkoxyalkyl; and 2′-NMA (N-methylacetamide).

[0254] Other modifications include 2′-methoxy (2′-OCH₃), 2′-aminopropoxy (2′-OCH₂CH₂CH₂NH₂), 2′-O-hexadecyl, and 2′-fluoro (2′-F). Similar modifications can also be made at other positions on the RNA of a RNAi agent, particularly the 3′ position of the sugar on the 3′ terminal nucleotide or in 2′-5′ linked dsRNAs and the 5′ position of 5′ terminal nucleotide. RNAi agents can also have sugar mimetics such as cyclobutyl moicties in place of the pentofuranosyl sugar. Representative U.S. patents that teach the preparation of such modified sugar structures include, but are not limited to, U.S. Pat. Nos. 4,981,957; 5,118,800; 5,319,080; 5,359,044; 5,393,878; 5,446,137; 5,466,786; 5,514,785; 5,519,134; 5,567,811; 5,576,427; 5,591,722; 5,597,909; 5,610,300; 5,627,053; 5,639,873; 5,646,265; 5,658,873; 5,670,633; and 5,700,920, certain of which are commonly owned with the instant application. The entire contents of each of the foregoing are hereby incorporated herein by reference.

[0255] An RNAi agent of the disclosure can also include nucleobase (often referred to in the art simply as “base”) modifications or substitutions. As used herein, “unmodified” or “natural” nucleobases include the purine bases adenine (A) and guanine (G), and the pyrimidine bases thymine (T), cytosine (C) and uracil (U). Modified nucleobases include other synthetic and natural nucleobases such as 5-methylcytosine (5-me-C), 5-hydroxymethyl cytosine, xanthine, hypoxanthine, 2-aminoadenine, 6-methyl and other alkyl derivatives of adenine and guanine, 2-propyl and other alkyl derivatives of adenine and guanine, 2-thiouracil, 2-thiothymine and 2-thiocytosine, 5-halouracil and cytosine, 5-propynyl uracil and cytosine, 6-azo uracil, cytosine and thymine, 5-uracil (pseudouracil), 4-thiouracil, 8-halo, 8-amino, 8-thiol, 8-thioalkyl, 8-hydroxyl anal other 8-substituted adenines and guanines, 5-halo, particularly 5-bromo, 5-trifluoromethyl and other 5-substituted uracils and cytosines, 7-methylguanine and 7-methyladenine, 8-azaguanine and 8-azaadenine, 7-deazaguanine and 7-daazaadenine and 3-deazaguanine and 3-deazaadenine. Further nucleobases include those disclosed in U.S. Pat. No. 3,687,808, those disclosed in Modified Nucleosides in Biochemistry, Biotechnology and Medicine, Herdewijn, P. ed. Wiley-VCH, 2008; those disclosed in The Concise Encyclopedia Of Polymer Science And Engineering, pages 858-859, Kroschwitz, J. L, ed. John Wiley & Sons, 1990, these disclosed by Englisch et al., (1991) Angewandte Chemie, International Edition, 30:613, and those disclosed by Sanghvi, Y S., Chapter 15, dsRNA Research and Applications, pages 289-302, Crooke. S. T. and Lebleu, B., Ed., CRC Press, 1993. Certain of these nucleobases are particularly useful for increasing the binding affinity of the oligomeric compounds featured in the disclosure. These include 5-substituted pyrimidines, 6-azapyrimidines and N-2, N-6 and 0-6 substituted purines, including 2-aminopropyladenine, 5-propynyluracil and 5-propynylcytosine. 5-methylcytosine substitutions have been shown to increase nucleic acid duplex stability by 0.6-1.2° C. (Sanghvi, Y. S., Crooke, S. T. and Lebleu, B., Eds., dsRNA Rescarch and Applications, CRC Press, Boca Raton, 1993, pp. 276-278) and are exemplary base substitutions, even more particularly when combined with 2′-O-methoxyethyl sugar modifications.

[0256] Representative U.S. patents that teach the preparation of certain of the above noted modified nucleobases as well as other modified nucleobases include, but are not limited to, the above noted U.S. Pat. Nos. 3,687,808, 4,845,205; 5,130,30; 5,134,066; 5,175,273; 5,367,066; 5,432,272; 5,457,187; 5,459,255; 5,484,908; 5,502,177; 5,525,711; 5,552,540; 5,587,469; 5,594,121, 5,596,091; 5,614,617; 5,681,941; 5,750,692; 6,015,886; 6,147,200; 6,166,197; 6,222,025; 6,235,887; 6,380,368; 6,528,640; 6,639,062; 6,617,438; 7,045,610; 7,427,672; and 7,495,088, the entire contents of cach of which are hereby incorporated herein by reference.

[0257] An RNAi agent of the disclosure can also be modified to include one or more bicyclic sugar moities. A “bicyclic sugar” is a furanosyl ring modified by a ring formed by the bridging of two carbons, whether adjacent or non-adjacent. A “bicyclic nucleoside” (“BNA”) is a nucleoside having a sugar moiety comprising a ring formed by bridging two carbons, whether adjacent or non-adjacent, of the sugar ring, thereby forming a bicyclic ring system. In certain embodiments, the bridge connects the 4′-carbon and the 2′-carbon of the sugar ring, optionally, via the 2′-acyclic oxygen atoms. Thus, in some embodiments an agent of the disclosure may include one or more locked nucleic acids (LNA). A locked nucleic acid is a nucleotide having a modified ribose moiety in which the ribose moicty comprises an extra bridge connecting the 2′ and 4′ carbons. In other words, an LNA is a nucleotide comprising a bicyclic sugar moicty comprising a 4′-CH₂—O-2′ bridge. This structure effectively “locks” the ribose in the 3′-endo structural conformation. The addition of locked nucleic acids to siRNAs has been shown to increase siRNA stability in serum, and to reduce off-target effects (Elmen, J. et al., (2005) Nucleic Acids Research 33(1):439-447; Mook, OR. et al., (2007) Mol Canc Ther 6(3):833-843; Grunweller, A. et al., (2003) Nucleic Acids Research 31(12):3185-3193). Examples of bicyclic nucleosides for use in the polynucleotides of the disclosure include without limitation nucleosides comprising a bridge between the 4′ and the 2′ ribosyl ring atoms. In certain embodiments, the antisense polynucleotide agents of the disclosure include one or more bicyclic nucleosides comprising a 4′ to 2′ bridge.

[0258] A locked nucleoside can be represented by the structure (omitting stereochemistry),

[chemical structure]

[0259] wherein B is a nucleobase or modified nucleobase and L is the linking group that joins the 2′-carbon to the 4′-carbon of the ribose ring. Examples of such 4′ to 2′ bridged bicyclic nucleosides, include but are not limited to 4′-(CH2)-O-2′ (LNA); 4′-(CH2)-S-2′; 4′-(CH2)2-O-2′ (ENA); 4′-CH(CH3)-O-2′ (also referred to as “constrained ethyl” or “cEt”) and 4′-CH(CH2OCH3)-O-2′ (and analogs thereof; see, e.g., U.S. Pat. No. 7,399,845); 4′-C(CH3)(CH3)-O-2′ (and analogs thereof; see e.g., U.S. Pat. No. 8,278,283); 4′-CH2-N(OCH3)-2′ (and analogs thereof; see e.g., U.S. Pat. No. 8,278,425); 4′-CH2-O-N(CH3)-2′ (see, e.g., U.S. Patent Publication No. 2004/0171570); 4′-CH2-N(R)—O-2′, wherein R is H, C1-C12 alkyl, or a nitrogen protecting group (see, e.g., U.S. Pat. No. 7,427,672); 4′-CH2-C(H)(CH3)-2′ (see, e.g., Chattopadhyaya et al., J. Org. Chem., 2009, 74, 118-134); and 4′-CH2-C(═CH2)-2′ (and analogs thereof; see, e.g., U.S. Pat. No. 8,278,426). The entire contents of each of the foregoing are hereby incorporated herein by reference.

[0260] Additional representative U.S. Patents and US Patent Publications that teach the preparation of locked nucleic acid nucleotides include, but are not limited to, the following: U.S. Pat. Nos. 6,268,490; 6,525,191; 6,670,461; 6,770,748; 6,794,499; 6,998,484; 7,053,207; 7,034,133;7,084,125; 7,399,845; 7,427,672; 7,569,686; 7,741,457; 8,022,193; 8,030,467; 8,278,425; 8,278,426; 8,278,283; US 2008/0039618; and US 2009/0012281, the entire contents of each of which are hereby incorporated herein by reference.

[0261] Any of the foregoing bicyclic nucleosides can be prepared having one or more stereochemical sugar configurations including for example α-L-ribofuranose and β-D-ribofuranose (see WO 99/14226).

[0262] An RNAi agent of the disclosure can also be modified to include one or more constrained ethyl nucleotides. As used herein, a “constrained ethyl nucleotide” or “cEt” is a locked nucleic acid comprising a bicyclic sugar moiety comprising a 4′-CH(CH3)-O-2′ bridge (i.e., L in the preceding structure). In one embodiment, a constrained ethyl nucleotide is in the S conformation referred to herein as “S-cEt.”

[0263] An RNAi agent of the disclosure may also include one or more “conformationally restricted nucleotides” (“CRN”). CRN are nucleotide analogs with a linker connecting the C2′and C4′ carbons of ribose or the —C3′ and —C5′ carbons of ribose. CRN lock the ribose ring into a stable conformation and increase the hybridization affinity to mRNA. The linker is of sufficient length to place the oxygen in an optimal position for stability and affinity resulting in less ribose ring puckering.

[0264] Representative publications that teach the preparation of certain of the above noted CRN include, but are not limited to, US 2013/0190383; and WO 2013/036868, the entire contents of each of which are hereby incorporated herein by reference.

[0265] In some embodiments, a RNAi agent of the disclosure comprises one or more monomers that are UNA (unlocked nucleic acid) nucleotides. UNA is unlocked acyclic nucleic acid, wherein any of the bonds of the sugar has been removed, forming an unlocked “sugar” residue. In one example, UNA also encompasses monomer with bonds between C1′-C4′ have been removed (i.e. the covalent carbon-oxygen-carbon bond between the C1′ and C4′ carbons). In another example, the C2′-C3′ bond (i.e. the covalent carbon-carbon bond between the C2′ and C3′ carbons) of the sugar has been removed (see Nuc. Acids Symp. Series, 52, 133-134 (2008) and Fluiter et al., Mol. Biosyst., 2009, 10, 1039 hereby incorporated by reference).

[0266] Representative U.S. publications that teach the preparation of UNA include, but are not limited to, U.S. Pat. No. 8,314,227; and US Patent Publication Nos. 2013/0096289; 2013/0011922; and 2011/0313020, the entire contents of each of which are hereby incorporated herein by reference.

[0267] Potentially stabilizing modifications to the ends of RNA molecules can include N-(acetylaminocaproyl)-4-hydroxyprolinol (Hyp-C6-NHAc), N-(caproyl-4-hydroxyprolinol (Hyp-C6), N-(acetyl-4-hydroxyprolinol (Hyp-NHAc), thymidine-2′-O-deoxythymidine (ether), N-(aminocaproyl)-4-hydroxyprolinol (Hyp-C6-amino), 2-docosanoyl-uridine-3′-phosphate, inverted 2′-deoxy-modified ribonucleotide, such as inverted dT(idT), inverted dA (idA), and inverted abasic 2′-deoxyribonucleotide (iAb) and others. Disclosure of this modification can be found in WO 2011/005861.

[0268] In one example, the 3′ or 5′ terminal end of a oligonucleotide is linked to an inverted 2′-deoxy-modified ribonucleotide, such as inverted dT(idT), inverted dA (idA), or a inverted abasic 2′-deoxyribonucleotide (iAb). In one particular example, the inverted 2′-deoxy-modified ribonucleotide is linked to the 3′end of an oligonucleotide, such as the 3′-end of a sense strand described herein, where the linking is via a 3′-3′ phosphodiester linkage or a 3′-3′-phosphorothioate linkage.

[0269] In another example, the 3′-end of a sense strand is linked via a 3′-3′-phosphorothioate linkage to an inverted abasic ribonucleotide (iAb). In another example, the 3′-end of a sense strand is linked via a 3′-3′-phosphorothioate linkage to an inverted dA (idA).

[0270] In one particular example, the inverted 2′-deoxy-modified ribonucleotide is linked to the 3′end of an oligonucleotide, such as the 3′-end of a sense strand described herein, where the linking is via a 3′-3′ phosphodiester linkage or a 3′-3′-phosphorothioate linkage.

[0271] In another example, the 3′-terminal nucleotides of a sense strand is an inverted dA (idA) and is linked to the preceding nucleotide via a 3′-3′-linkage (e.g., 3′-3′-phosphorothioate linkage).

[0272] Other modifications of a RNAi agent of the disclosure include a 5′ phosphate or 5′ phosphate mimic, e.g., a 5′-terminal phosphate or phosphate mimic on the antisense strand of a RNAi agent. Suitable phosphate mimics are disclosed in, for example US 2012/0157511, the entire contents of which are incorporated herein by reference.

### A. Modified RNAi Agents Comprising Motifs of the Disclosure

[0273] In certain aspects of the disclosure, the double-stranded RNAi agents of the disclosure include agents with chemical modifications as disclosed, for example, in WO 2013/075035, the entire contents of which are incorporated herein by reference. As shown herein and in WO 2013/075035, one or more motifs of three identical modifications on three consecutive nucleotides may be introduced into a sense strand or antisense strand of an RNAi agent, particularly at or near the cleavage site. In some embodiments, the sense strand and antisense strand of the RNAi agent may otherwise be completely modified. The introduction of these motifs interrupts the modification pattern, if present, of the sense or antisense strand. The RNAi agent may be optionally conjugated with a lipophilic ligand, e.g., a C16 ligand, for instance on the sense strand. The RNAi agent may be optionally modified with a (S)-glycol nucleic acid (GNA) modification, for instance on one or more residues of the antisense strand.

[0274] Accordingly, the disclosure provides double stranded RNAi agents capable of inhibiting the expression of a target genome or gene (i.e., a SGLT2 gene) in vivo. The RNAi agent comprises a sense strand and an antisense strand. Each strand of the RNAi agent may be 15-30 nucleotides in length. For example, each strand may be 16-30 nucleotides in length, 17-30 nucleotides in length, 25-30 nucleotides in length, 27-30 nucleotides in length, 17-23 nucleotides in length, 17-21 nucleotides in length, 17-19 nucleotides in length, 19-25 nucleotides in length, 19-23 nucleotides in length, 19-21 nucleotides in length, 21-25 nucleotides in length, or 21-23 nucleotides in length. In certain embodiments, cach strand is 19-23 nucleotides in length.

[0275] The sense strand and antisense strand typically form a duplex double stranded RNA (“dsRNA”), also referred to herein as an “RNAi agent.” The duplex region of an RNAi agent may be 15-30 nucleotide pairs in length. For example, the duplex region can be 16-30 nucleotide pairs in length, 17-30 nucleotide pairs in length, 27-30 nucleotide pairs in length, 17-23 nucleotide pairs in length, 17-21 nucleotide pairs in length, 17-19 nucleotide pairs in length, 19-25 nucleotide pairs in length, 19-23 nucleotide pairs in length, 19- 21 nucleotide pairs in length, 21-25 nucleotide pairs in length, or 21-23 nucleotide pairs in length. In another example, the duplex region is selected from 15, 16, 17, 18, 19, 20, 21, 22, 23, 24, 25, 26, and 27 nucleotides in length. In certain embodiments, the duplex region is 19-21 nucleotide pairs in length.

[0276] In one embodiment, the RNAi agent may contain one or more overhang regions or capping groups at the 3′-end, 5′-end, or both ends of one or both strands. The overhang can be 1-6 nucleotides in length, for instance 2-6 nucleotides in length, 1-5 nucleotides in length, 2-5 nucleotides in length, 1-4 nucleotides in length, 2-4 nucleotides in length, 1-3 nucleotides in length, 2-3 nucleotides in length, or 1-2 nucleotides in length. In certain embodiments, the nucleotide overhang region is 2 nucleotides in length. The overhangs can be the result of one strand being longer than the other, or the result of two strands of the same length being staggered. The overhang can form a mismatch with the target mRNA or it can be complementary to the gene sequences being targeted or can be another sequence. The first and second strands can also be joined, e.g., by additional bases to form a hairpin, or by other non-base linkers.

[0277] In one embodiment, the nucleotides in the overhang region of the RNAi agent can each independently be a modified or unmodified nucleotide including, but no limited to 2′-sugar modified. such as, 2-F, 2′-O-methyl, thymidine (T), and any combinations thereof.

[0278] For example. TT can be an overhang sequence for either end on either strand. The overhang can form a mismatch with the target mRNA or it can be complementary to the gene sequences being targeted or can be another sequence.

[0279] The 5′- or 3′-overhangs at the sense strand, antisense strand or both strands of the RNAi agent may be phosphorylated. In some embodiments, the overhang region(s) contains two nucleotides having a phosphorothioate between the two nucleotides, where the two nucleotides can be the same or different. In one embodiment, the overhang is present at the 3′-end of the sense strand, antisense strand, or both strands. In one embodiment, this 3′-overhang is present in the antisense strand. In one embodiment, this 3′-overhang is present in the sense strand.

[0280] The RNAi agent may contain only a single overhang, which can strengthen the interference activity of the RNAi, without affecting its overall stability. For example, the single-stranded overhang may be located at the 3′-terminal end of the sense strand or, alternatively, at the 3′-terminal end of the antisense strand. The RNAi may also have a blunt end, located at the 5′-end of the antisense strand (i.e., the 3′-end of the sense strand) or vice versa. Generally, the antisense strand of the RNAi has a nucleotide overhang at the 3′-end, and the 5′-end is blunt. While not wishing to be bound by theory, the asymmetric blunt end at the 5′-end of the antisense strand and 3′-end overhang of the antisense strand favor the guide strand loading into RISC process.

[0281] In one embodiment, the RNAi agent is a double blunt-ended of 19 nucleotides in length, wherein the sense strand contains at least one motif of three 2′-F modifications on three consecutive nucleotides at positions 7, 8, and 9 from the 5′end. The antisense strand contains at least one motif of three 2′-O-methyl modifications on three consecutive nucleotides at positions 11, 12, and 13 from the 5′end.

[0282] In another embodiment, the RNAi agent is a double blunt-ended of 20 nucleotides in length, wherein the sense strand contains at least one motif of three 2′-F modifications on three consecutive nucleotides at positions 8, 9, and 10 from the 5′end. The antisense strand contains at least one motif of three 2′-O-methyl modifications on three consecutive nucleotides at positions 11, 12, and 13 from the 5′end.

[0283] In yet another embodiment, the RNAi agent is a double blunt-ended of 21 nucleotides in length, wherein the sense strand contains at least one motif of three 2′-F modifications on three consecutive nucleotides at positions 9, 10, and 11 from the 5′end. The antisense strand contains at least one motif of three 2′-O-methyl modifications on three consecutive nucleotides at positions 11. 12, and 13 from the 5′end.

[0284] In one embodiment, the RNAi agent comprises a 21 nucleotide sense strand and a 23 nucleotide antisense strand, wherein the sense strand contains at least one motif of three 2′-F modifications on three consecutive nucleotides at positions 9, 10, and 11 from the 5′end; the antisense strand contains at least one motif of three 2′-O-methyl modifications on three consecutive nucleotides at positions 11, 12, and 13 from the 5′end, wherein one end of the RNAi agent is blunt, while the other end comprises a 2 nucleotide overhang. In one example, the two nucleotide overhang is at the 3′-end of the antisense strand. When the 2 nucleotide overhang is at the 3′-end of the antisense strand, there may be two phosphorothioate internucleotide linkages between the terminal three nucleotides, wherein two of the three nucleotides are the overhang nucleotides, and the third nucleotide is a paired nucleotide next to the overhang nucleotide. In one embodiment, the RNAi agent additionally has two phosphorothioate internucleotide linkages between the terminal three nucleotides at both the 5′-end of the sense strand and at the 5′-end of the antisense strand. In one embodiment, every nucleotide in the sense strand and the antisense strand of the RNAi agent, including the nucleotides that are part of the motifs are modified nucleotides. In one embodiment each residue is independently modified with a 2′-O-methyl or 2′-fluoro, e.g., in an alternating motif. Optionally, the RNAi agent further comprises a ligand (e.g., a lipophilic ligand, optionally a C16 ligand).

[0285] In one embodiment, the RNAi agent comprises a sense and an antisense strand, wherein the sense strand is 25-30 nucleotide residues in length, wherein starting from the 5′ terminal nucleotide (position 1) positions 1 to 23 of the first strand comprise at least 8 ribonucleotides; the antisense strand is 36-66 nucleotide residues in length and, starting from the 3′ terminal nucleotide, comprises at least 8 ribonucleotides in the positions paired with positions 1-23 of sense strand to form a duplex; wherein at least the 3′ terminal nucleotide of antisense strand is unpaired with sense strand, and up to 6 consecutive 3′ terminal nucleotides are unpaired with sense strand, thereby forming a 3′ single stranded overhang of 1-6 nucleotides; wherein the 5′ terminus of antisense strand comprises from 10-30 consecutive nucleotides which are unpaired with sense strand, thereby forming a 10-30 nucleotide single stranded 5′ overhang; wherein at least the sense strand 5′ terminal and 3′ terminal nucleotides are base paired with nucleotides of antisense strand when sense and antisense strands are aligned for maximum complementarity, thereby forming a substantially duplexed region between sense and antisense strands; and antisense strand is sufficiently complementary to a target RNA along at least 19 ribonucleotides of antisense strand length to reduce target gene expression when the double stranded nucleic acid is introduced into a mammalian cell; and wherein the sense strand contains at least one motif of three 2′-F modifications on three consecutive nucleotides, where at least one of the motifs occurs at or near the cleavage site. The antisense strand contains at least one motif of three 2′-O-methyl modifications on three consecutive nucleotides at or near the cleavage site.

[0286] In one embodiment, the RNAi agent comprises sense and antisense strands, wherein the RNAi agent comprises a first strand having a length which is at least 25 and at most 29 nucleotides and a second strand having a length which is at most 30 nucleotides with at least one motif of three 2′-O-methyl modifications on three consecutive nucleotides at position 11, 12, and 13 from the 5′ end; wherein the 3′ end of the first strand and the 5′ end of the second strand form a blunt end and the second strand is 1-4 nucleotides longer at its 3′ end than the first strand, wherein the duplex region region which is at least 25 nucleotides in length, and the second strand is sufficiently complemenatary to a target mRNA along at least 19 nucleotide of the second strand length to reduce target gene expression when the RNAi agent is introduced into a mammalian cell, and wherein dicer cleavage of the RNAi agent results in an siRNA comprising the 3′ end of the second strand, thereby reducing expression of the target gene in the mammal. Optionally, the RNAi agent further comprises a ligand.

[0287] In one embodiment, the sense strand of the RNAi agent contains at least one motif of three identical modifications on three consecutive nucleotides, where one of the motifs occurs at the cleavage site in the sense strand.

[0288] In one embodiment, the antisense strand of the RNAi agent can also contain at least one motif of three identical modifications on three consecutive nucleotides, where one of the motifs occurs at or near the cleavage site in the antisense strand.

[0289] For an RNAi agent having a duplex region of 17-23 nucleotide in length, the cleavage site of the antisense strand is typically around the 10, 11 and 12 positions from the 5′-end. Thus the motifs of three identical modifications may occur at the 9, 10, and 11 positions; 10, 11, and 12 positions; 11, 12, and 13 positions; 12, 13, and 14 positions; or 13, 14, and 15 positions of the antisense strand, the count starting from the first nucleotide from the 5′-end of the antisense strand, or, the count starting from the first paired nucleotide within the duplex region from the 5′-end of the antisense strand. The cleavage site in the antisense strand may also change according to the length of the duplex region of the RNAi from the 5′-end.

[0290] The sense strand of the RNAi agent may contain at least one motif of three identical modifications on three consecutive nucleotides at the cleavage site of the strand; and the antisense strand may have at least one motif of three identical modifications on three consecutive nucleotides at or near the cleavage site of the strand. When the sense strand and the antisense strand form a dsRNA duplex, the sense strand and the antisense strand can be so aligned that one motif of the three nucleotides on the sense strand and one motif of the three nucleotides on the antisense strand have at least one nucleotide overlap, i.e., at least one of the three nucleotides of the motif in the sense strand forms a base pair with at least one of the three nucleotides of the motif in the antisense strand. Alternatively, at least two nucleotides may overlap, or all three nucleotides may overlap.

[0291] In one embodiment, the sense strand of the RNAi agent may contain more than one motif of three identical modifications on three consecutive nucleotides. The first motif may occur at or near the cleavage site of the strand and the other motifs may be a wing modification. The term “wing modification” herein refers to a motif occurring at another portion of the strand that is separated from the motif at or near the cleavage site of the same strand. The wing modification is either adajacent to the first motif or is separated by at least one or more nucleotides. When the motifs are immediately adjacent to each other then the chemistry of the motifs are distinct from each other and when the motifs are separated by one or more nucleotide than the chemistries can be the same or different. Two or more wing modifications may be present. For instance, when two wing modifications are present, each wing modification may occur at one end relative to the first motif which is at or near cleavage site or on either side of the lead motif.

[0292] Like the sense strand, the antisense strand of the RNAi agent may contain more than one motif of three identical modifications on three consecutive nucleotides, with at least one of the motifs occurring at or near the cleavage site of the strand. This antisense strand may also contain one or more wing modifications in an alignment similar to the wing modifications that may be present on the sense strand.

[0293] In one embodiment, the wing modification on the sense strand or antisense strand of the RNAi agent typically does not include the first one or two terminal nucleotides at the 3′-end, 5′-end or both ends of the strand.

[0294] In another embodiment, the wing modification on the sense strand or antisense strand of the RNAi agent typically does not include the first one or two paired nucleotides within the duplex region at the 3′-end, 5′-end or both ends of the strand.

[0295] When the sense strand and the antisense strand of the RNAi agent each contain at least one wing modification, the wing modifications may fall on the same end of the duplex region, and have an overlap of one, two or three nucleotides.

[0296] When the sense strand and the antisense strand of the RNAi agent each contain at least two wing modifications, the sense strand and the antisense strand can be so aligned that two modifications each from one strand fall on one end of the duplex region, having an overlap of one, two or three nucleotides; two modifications each from one strand fall on the other end of the duplex region, having an overlap of one, two or three nucleotides; two modifications one strand fall on each side of the lead motif, having an overlap of one, two, or three nucleotides in the duplex region.

[0297] In one embodiment, the RNAi agent comprises mismatch(es) with the target, within the duplex, or combinations thereof. The mistmatch may occur in the overhang region or the duplex region. The base pair may be ranked on the basis of their propensity to promote dissociation or melting (e.g., on the free energy of association or dissociation of a particular pairing, the simplest approach is to examine the pairs on an individual pair basis, though next neighbor or similar analysis can also be used). In terms of promoting dissociation: A:U is preferred over G:C; G:U is preferred over G:C; and I:C is preferred over G:C (I=inosine). Mismatches, e.g., non-canonical or other than canonical pairings (as described elsewhere herein) are preferred over canonical (A:T, A:U, G:C) pairings; and pairings which include a universal base are preferred over canonical pairings.

[0298] In one embodiment, the RNAi agent comprises at least one of the first 1, 2, 3, 4, or 5 base pairs within the duplex regions from the 5′-end of the antisense strand independently selected from the group of: A:U, G:U, I:C, and mismatched pairs, e.g., non-canonical or other than canonical pairings or pairings which include a universal base, to promote the dissociation of the antisense strand at the 5′-end of the duplex.

[0299] In one embodiment, the nucleotide at the 1 position within the duplex region from the 5′-end in the antisense strand is selected from the group consisting of A, dA, dU, U, and dT. Alternatively, at least one of the first 1, 2 or 3 base pair within the duplex region from the 5′-end of the antisense strand is an AU base pair. For example, the first base pair within the duplex region from the 5′-end of the antisense strand is an AU base pair.

[0300] In another embodiment, the nucleotide at the 3′-end of the sense strand is deoxythimidine (dT). In another embodiment, the nucleotide at the 3′-end of the antisense strand is deoxythimidine (dT). In one embodiment, there is a short sequence of deoxythimidine nucleotides, for example, two dT nucleotides on the 3′-end of the sense or antisense strand.

[0301] In one embodiment, the sense strand sequence may be represented by formula (I):

5′ nₚ-Nₐ—(XXX)ᵢ—N_{b}—YYY—N_{b}—(ZZZ)ⱼ—Nₐ-n_{q} 3′ (I)
[0302] wherein:
[0303] i and j are each independently 0 or 1;
[0304] p and q are each independently 0-6;
[0305] each Nₐ independently represents an oligonucleotide sequence comprising 0-25 modified nucleotides, each sequence comprising at least two differently modified nucleotides;
[0306] each N_{b} independently represents an oligonucleotide sequence comprising 0-10 modified nucleotides;
[0307] each nₚ and n_{q} independently represent an overhang nucleotide;
[0308] wherein Nb and Y do not have the same modification; and
[0309] XXX, YYY and ZZZ each independently represent one motif of three identical modifications on three consecutive nucleotides. In one embodiment, YYY is all 2′-F modified nucleotides.

[0310] In one embodiment, the Nₐ or N_{b} comprise modifications of alternating pattern.

[0311] In one embodiment, the YYY motif occurs at or near the cleavage site of the sense strand. For example, when the RNAi agent has a duplex region of 17-23 nucleotides in length, the YYY motif can occur at or the vicinity of the cleavage site (e.g.: can occur at positions 6, 7, 8, 7, 8, 9, 8, 9, 10, 9, 10, 11, 10, 11, 12 or 11, 12, 13) of—the sense strand, the count starting from the 1^{st} nucleotide, from the 5′-end; or optionally, the count starting at the 1^{st} paired nucleotide within the duplex region, from the 5′-end.

[0312] In one embodiment, i is 1 and j is 0, or i is 0 and j is 1, or both i and j are 1. The sense strand can therefore be represented by the following formulas:

5′ nₚ-Nₐ—YYY—N_{b}—ZZZ—Nₐ-n_{q} 3′ (I)(Ib);

5′ nₚ-Nₐ—XXX—N_{b}—YYY—Nₐ-n_{q} 3′ (I)(Ic); or

5′ nₚ-Nₐ—XXX—N_{b}—YYY—N_{b}—ZZZ—Nₐ-n_{q} 3′ (I)(Id).

[0313] When the sense strand is represented by formula (Ib), N_{b} represents an oligonucleotide sequence comprising 0-10, 0-7, 0-5, 0-4, 0-2 or 0 modified nucleotides.

[0314] Each Nₐ independently can represent an oligonucleotide sequence comprising 2-20, 2-15, or 2-10 modified nucleotides.

[0315] When the sense strand is represented as formula (Ic), N_{b} represents an oligonucleotide sequence comprising 0-10, 0-7, 0-10, 0-7, 0-5, 0-4, 0-2 or 0 modified nucleotides. Each Nₐ can independently represent an oligonucleotide sequence comprising 2-20, 2-15, or 2-10 modified nucleotides.

[0316] When the sense strand is represented as formula (Id), each N_{b} independently represents an oligonucleotide sequence comprising 0-10, 0-7, 0-5, 0-4, 0-2 or 0 modified nucleotides. In one embodiment, N_{b} is 0, 1, 2, 3, 4, 5 or 6. Each Nₐ can independently represent an oligonucleotide sequence comprising 2-20, 2-15, or 2-10 modified nucleotides.

[0317] Each of X, Y and Z may be the same or different from each other.

[0318] In other embodiments, i is 0 and j is 0, and the sense strand may be represented by the formula:

5′ nₚ-Nₐ—YYY—Nₐ-n_{q} 3′ (Ia).

[0319] When the sense strand is represented by formula (Ia), each Nₐ independently can represent an oligonucleotide sequence comprising 2-20, 2-15, or 2-10 modified nucleotides.

[0320] In one embodiment, the antisense strand sequence of the RNAi may be represented by formula (II):

5′ n_{q′}-Nₐ′—(Z′Z′Z′)ₖ—N_{b}′—Y′Y′Y′—N_{b}′—(X′X′X′)ₗ—N′ₐ-nₚ′ 3′ (II)
[0321] wherein:
[0322] k and l are each independently 0 or 1;
[0323] p′ and q′ are each independently 0-6;
   each Nₐ′ independently represents an oligonucleotide sequence comprising 0-25 modified nucleotides,
   each sequence comprising at least two differently modified nucleotides;
   each N_{b}′ independently represents an oligonucleotide sequence comprising 0-10 modified nucleotides;
   each nₚ′ and n_{q}′ independently represent an overhang nucleotide;
   wherein N_{b}′ and Y′ do not have the same modification; and
   X′X′X′, Y′Y′Y′ and Z′Z′Z′ each independently represent one motif of three identical modifications on three consecutive nucleotides.

[0324] In one embodiment, the Nₐ′ or N_{b}′ comprise modifications of alternating pattern.

[0325] The Y′Y′Y′ motif occurs at or near the cleavage site of the antisense strand. For example, when the RNAi agent has a duplex region of 17-23 nucleotides in length, the Y′Y′Y′ motif can occur at positions 9, 10, 11; 10, 11, 12; 11, 12, 13; 12, 13, 14; or 13, 14, 15 of the antisense strand, with the count starting from the 1st nucleotide, from the 5′-end; or optionally, the count starting at the 1^{st} paired nucleotide within the duplex region, from the 5′-end. In one embodiment, the Y′Y′Y′ motif occurs at positions 11, 12, 13.

[0326] In one embodiment, Y′Y′Y′ motif is all 2′-OMe modified nucleotides.

[0327] In one embodiment, k is 1 and l is 0, or k is 0 and l is 1, or both k and l are 1.

[0328] The antisense strand can therefore be represented by the following formulas:

5′ n_{q′}-Nₐ′—Z′Z′Z′—N_{b}′—Y′Y′Y′—Nₐ′-n_{p′} 3′ (IIb);

5′ n_{q′}-Nₐ′—Y′Y′Y′—N_{b}′—X′X′X′-n_{p′} 3′ (IIc); or

5′ n_{q′}-Nₐ′—Z′Z′Z′—N_{b}′—Y′Y′Y′—N_{b}′X′X′X′—Nₐ′-n_{p′} 3′ (IId).

[0329] When the antisense strand is represented by formula (IIb), N_{b}′ represents an oligonucleotide sequence comprising 0-10, 0-7, 0-10, 0-7, 0-5, 0-4, 0-2 or 0 modified nucleotides. Each Nₐ′ independently represents an oligonucleotide sequence comprising 2-20, 2-15, or 2-10 modified nucleotides.

[0330] When the antisense strand is represented as formula (IIc), N_{b}′ represents an oligonucleotide sequence comprising 0-10, 0-7, 0-10, 0-7, 0-5, 0-4, 0-2 or 0 modified nucleotides. Each Nₐ′ independently represents an oligonucleotide sequence comprising 2-20, 2-15, or 2-10 modified nucleotides.

[0331] When the antisense strand is represented as formula (IId), each N_{b}′ independently represents an oligonucleotide sequence comprising 0-10, 0-7, 0-10, 0-7, 0-5, 0-4, 0-2 or 0 modified nucleotides. Each Nₐ′ independently represents an oligonucleotide sequence comprising 2-20, 2-15, or 2-10 modified nucleotides. In one embodiment, N_{b} is 0, 1, 2, 3, 4, 5 or 6.

[0332] In other embodiments, k is 0 and 1 is 0 and the antisense strand may be represented by the formula:

5′ n_{p′}-N_{a′}—Y′Y′Y′—N_{a′}′-n_{p′} 3′ (Ia).

[0333] When the antisense strand is represented as formula (IIa), each Nₐ′ independently represents an oligonucleotide sequence comprising 2-20, 2-15, or 2-10 modified nucleotides.

[0334] Each of X′, Y′ and Z′ may be the same or different from each other.

[0335] Each nucleotide of the sense strand and antisense strand may be independently modified with LNA, glycol nucleic acid (GNA), hexitol nucleic acid (HNA), 2′-methoxyethyl, 2′-O-methyl, 2′-O-allyl, 2′-C-allyl, 2′-hydroxyl, or 2′-fluoro. For example, each nucleotide of the sense strand and antisense strand is independently modified with 2′-O-methyl or 2′-fluoro. Each X, Y, Z, X′, Y′ and Z′, in particular, may represent a 2′-O-methyl modification or a 2′-fluoro modification.

[0336] In one embodiment, the sense strand of the RNAi agent may contain YYY motif occurring at 9, 10 and 11 positions of the strand when the duplex region is 21 nt, the count starting from the 1^{st} nucleotide from the 5′-end, or optionally, the count starting at the 1^{st} paired nucleotide within the duplex region, from the 5′-end; and Y represents 2′-F modification. The sense strand may additionally contain XXX motif or ZZZ motifs as wing modifications at the opposite end of the duplex region; and XXX and ZZZ each independently represents a 2′-OMe modification or 2′-F modification.

[0337] In one embodiment the antisense strand may contain Y′Y′Y′ motif occurring at positions 11, 12, 13 of the strand, the count starting from the 1^{st} nucleotide from the 5′-end, or optionally, the count starting at the 1^{st} paired nucleotide within the duplex region, from the 5′-end; and Y′ represents 2′-O-methyl modification. The antisense strand may additionally contain X′X′X′ motif or Z′Z′Z′ motifs as wing modifications at the opposite end of the duplex region; and X′X′X′ and Z′Z′Z′ each independently represents a 2′-OMe modification or 2′-F modification.

[0338] The sense strand represented by any one of the above formulas (Ia), (Ib), (Ic), and (Id) forms a duplex with a antisense strand being represented by any one of formulas (IIa), (IIb), (IIc), and (IId), respectively.

[0339] Accordingly, the RNAi agents for use in the methods of the disclosure may comprise a sense strand and an antisense strand, each strand having 14 to 30 nucleotides, the RNAi duplex represented by formula (III):

sense: 5′ nₚ-Nₐ—(XXX)ᵢ—N_{b}—YYY—N_{b}—(ZZZ)ⱼ-Nₐ-n_{q} 3′

antisense: 3′ nₚ′-Nₐ′—(X′X′X′)ₖ—N_{b}′—Y′Y′Y′—N_{b}′—(Z′Z′Z′)ₗ—Nₐ′-n_{q}′ 5′ (III)
[0340] wherein:
[0341] i, j, k, and I are each independently 0 or 1;
[0342] p, p′, q, and q′ are each independently 0-6;
[0343] each Nₐ and Nₐ′ independently represents an oligonucleotide sequence comprising 0-25 modified nucleotides, each sequence comprising at least two differently modified nucleotides;
[0344] each N_{b} and N_{b}' independently represents an oligonucleotide sequence comprising 0-10 modified nucleotides;
[0345] wherein
[0346] each nₚ′, nₚ, n_{q}′, and n_{q}, each of which may or may not be present, independently represents an overhang nucleotide; and
[0347] XXX, YYY, ZZZ, X′X′X′, Y′Y′Y′, and Z′Z′Z′ each independently represent one motif of three identical modifications on three consecutive nucleotides.

[0348] In one embodiment, i is 0 and j is 0; or i is 1 and j is 0; or i is 0 and j is 1; or both i and j are 0; or both i and j are 1. In another embodiment, k is 0 and l is 0; or k is 1 and l is 0; k is 0 and l is 1; or both k and l are 0; or both k and l are 1.

[0349] Exemplary combinations of the sense strand and antisense strand forming a RNAi duplex include the formulas below:

5′ nₚ-Nₐ—YYY—Nₐ-n_{q} 3′

3′ nₚ′-Nₐ—Y′Y′Y′—Nₐ′n_{q}′ 5′ (IIIa)

5′ nₚ-Nₐ—YYY—N_{b}—ZZZ —Nₐ-n_{q} 3′

3′ nₚ′-Nₐ′—Y′Y′Y′—N_{b}′—Z′Z′Z′—Nₐ′n_{q}′ 5′ (IIIb)

5′ nₚ-Nₐ—XXX—N_{b}—YYY—Nₐ-n_{q} 3′

3′ nₚ′-Nₐ′—X′X′X′—N_{b}′—Y′Y′Y′—Nₐ′-n_{q}′ 5′ (IIIc)

5′ nₚ-Nₐ—XXX—N_{b}—YYY—N_{b}—ZZZ—Nₐ-n_{q} 3′

5′ nₚ′—Nₐ′—X′X′X′—N_{b}′—Y′Y′Y′—N_{b}′—Z′Z′Z′—Nₐ-n_{q}′ 5′ (IIId)

[0350] When the RNAi agent is represented by formula (IIIa), each Nₐ independently represents an oligonucleotide sequence comprising 2-20, 2-15, or 2-10 modified nucleotides.

[0351] When the RNAi agent is represented by formula (IIIb), each N_{b} independently represents an oligonucleotide sequence comprising 1-10, 1-7, 1-5 or 1-4 modified nucleotides. Each Nₐ independently represents an oligonucleotide sequence comprising 2-20, 2-15, or 2-10 modified nucleotides.

[0352] When the RNAi agent is represented as formula (IIIc), each N_{b}, N_{b}′ independently represents an oligonucleotide sequence comprising 0-10, 0-7, 0-10, 0-7, 0-5, 0-4, 0-2 or 0 modified nucleotides. Each Nₐ independently represents an oligonucleotide sequence comprising 2-20, 2-15, or 2-10 modified nucleotides.

[0353] When the RNAi agent is represented as formula (IIId), each N_{b}, N_{b}′ independently represents an oligonucleotide sequence comprising 0-10, 0-7, 0-10, 0-7, 0-5, 0-4, 0-2 or 0 modified nucleotides. Each Nₐ, Nₐ′ independently represents an oligonucleotide sequence comprising 2-20, 2-15, or 2-10 modified nucleotides. Each of Nₐ, Nₐ′, N_{b} and N_{b}′ independently comprises modifications of alternating pattern.

[0354] In one embodiment, when the RNAi agent is represented by formula (IIId), the Nₐ modifications are 2′-O-methyl or 2′-fluoro modifications. In another embodiment, when the RNAi agent is represented by formula (IIId), the Nₐ modifications are 2′-O-methyl or 2′-fluoro modifications and nₚ′>0 and at least one nₚ′ is linked to a neighboring nucleotide a via phosphorothioate linkage. In yet another embodiment, when the RNAi agent is represented by formula (IIId), the Nₐ modifications are 2′-O-methyl or 2′-fluoro modifications , nₚ′>0 and at least one nₚ′ is linked to a neighboring nucleotide via phosphorothioate linkage, and the sense strand is conjugated to one or more C16 (or related) moieties attached through a bivalent or trivalent branched linker (described below). In another embodiment, when the RNAi agent is represented by formula (IIId), the Nₐ modifications are 2′-O-methyl or 2′-fluoro modifications , nₚ′>0 and at least one nₚ′ is linked to a neighboring nucleotide via phosphorothioate linkage, the sense strand comprises at least one phosphorothioate linkage, and the sense strand is conjugated to one or more lipophilic, e.g., C16 (or related) moieties, optionally attached through a bivalent or trivalent branched linker.

[0355] In one embodiment, when the RNAi agent is represented by formula (IIIa), the Nₐ modifications are 2′-O-methyl or 2′-fluoro modifications , nₚ′>0 and at least one nₚ′ is linked to a neighboring nucleotide via phosphorothioate linkage, the sense strand comprises at least one phosphorothioate linkage, and the sense strand is conjugated to one or more lipophilic, e.g., C16 (or related) moieties attached through a bivalent or trivalent branched linker.

[0356] In one embodiment, the RNAi agent is a multimer containing at least two duplexes represented by formula (III), (IIIa), (IIIb), (IIIc), and (IIId), wherein the duplexes are connected by a linker. The linker can be cleavable or non-cleavable. Optionally, the multimer further comprises a ligand. Each of the duplexes can target the same gene or two different genes; or each of the duplexes can target same gene at two different target sites.

[0357] In one embodiment, the RNAi agent is a multimer containing three, four, five, six or more duplexes represented by formula (III), (IIIa), (IIIb), (IIIc), and (IIId), wherein the duplexes are connected by a linker. The linker can be cleavable or non-cleavable. Optionally, the multimer further comprises a ligand. Each of the duplexes can target the same gene or two different genes; or each of the duplexes can target same gene at two different target sites.

[0358] In one embodiment, two RNAi agents represented by formula (III), (IIIa), (IIIb), (IIIc), and (IIId) are linked to each other at the 5′ end, and one or both of the 3′ ends and are optionally conjugated to to a ligand. Each of the agents can target the same gene or two different genes; or each of the agents can target same gene at two different target sites.

[0359] Various publications describe multimeric RNAi agents that can be used in the methods of the disclosure. Such publications include WO2007/091269, WO2010/141511, WO2007/117686, WO2009/014887, and WO2011/031520; and U.S. Pat. No. 7,858,769, the entire contents of each of which are hereby incorporated herein by reference.

[0360] In certain embodiments, the compositions and methods of the disclosure include a vinyl phosphonate (VP) modification of an RNAi agent as described herein. In exemplary embodiments, a 5′-vinyl phosphonate modified nucleotide of the disclosure has the structure:

[chemical structure]

wherein X is O or S;
[0361] R is hydrogen, hydroxy, fluoro, or C₁₋₂₀alkoxy (e.g., methoxy or n-hexadecyloxy);
[0362] R^{5′} is ═C(H)—P(O)(OH), and the double bond between the C5′ carbon and R^{5′} is in the E or Z orientation (e.g., E orientation); and
[0363] B is a nucleobase or a modified nucleobase, optionally where B is adenine, guanine, cytosine, thymine, or uracil.

[0364] In one embodiment, R5′ is ═C(H)—P(O)(OH)2 and the double bond between the C5′ carbon and R5′ is in the E orientation. In another embodiment, R is methoxy and R5′ is ═C(H)—P(O)(OH)2 and the double bond between the C5′ carbon and R5′ is in the E orientation. In another embodiment, X is S, R is methoxy, and R5′ is ═C(H)—P(O)(OH)2 and the double bond between the C5′ carbon and R5′ is in the E orientation.

[0365] A vinyl phosphonate of the instant disclosure may be attached to either the antisense or the sense strand of a dsRNA of the disclosure. In certain embodiments, a vinyl phosphonate of the instant disclosure is attached to the antisense strand of a dsRNA, optionally at the 5′ end of the antisense strand of the dsRNA.

[0366] Vinyl phosphate modifications are also contemplated for the compositions and methods of the instant disclosure. An exemplary vinyl phosphate structure includes the preceding structure, where R5′ is ═C(H)—P(O)(OH)2 and the double bond between the C5′ carbon and R5′ is in the E or Z orientation (e.g., E orientation).

### Thermally Destabilizing Modifications

[0367] In certain embodiments, a dsRNA molecule can be optimized for RNA interference by incorporating thermally destabilizing modifications in the seed region of the antisense strand. As used herein “seed region” means at positions 2-9 of the 5′-end of the referenced strand. For example, thermally destabilizing modifications can be incorporated in the seed region of the antisense strand to reduce or inhibit off-target gene silencing.

[0368] The term “thermally destabilizing modification(s)” includes modification(s) that would result with a dsRNA with a lower overall melting temperature (Tm) than the Tm of the dsRNA without having such modification(s). For example, the thermally destabilizing modification(s) can decrease the Tm of the dsRNA by 1-4° C., such as one, two, three or four degrees Celcius. And, the term “thermally destabilizing nucleotide” refers to a nucleotide containing one or more thermally destabilizing modifications.

[0369] It has been discovered that dsRNAs with an antisense strand comprising at least one thermally destabilizing modification of the duplex within the first 9 nucleotide positions, counting from the 5′ end, of the antisense strand have reduced off-target gene silencing activity. Accordingly, in some embodiments, the antisense strand comprises at least one (e.g., one, two, three, four, five or more) thermally destabilizing modification of the duplex within the first 9 nucleotide positions of the 5′ region of the antisense strand. In some embodiments, one or more thermally destabilizing modification(s) of the duplex is/are located in positions 2-9, such as positions 4-8, from the 5′-end of the antisense strand. In some further embodiments, the thermally destabilizing modification(s) of the duplex is/are located at position 6, 7 or 8 from the 5′-end of the antisense strand. In still some further embodiments, the thermally destabilizing modification of the duplex is located at position 7 from the 5′-end of the antisense strand. In some embodiments, the thermally destabilizing modification of the duplex is located at position 2, 3, 4, 5 or 9 from the 5′-end of the antisense strand.

[0370] The thermally destabilizing modifications can include, but are not limited to, abasic modification; mismatch with the opposing nucleotide in the opposing strand; and sugar modification such as 2′-deoxy modification, acyclic nucleotide, e.g., unlocked nucleic acids (UNA) or glycol nucleic acid (GNA); and 2′-5′-linked ribonucleotides (“3′-RNA”).

[0371] Exemplified abasic modifications include, but are not limited to the following:

[chemical structure]

### Wherein R=H, Me, Et or OMe; R′=H, Me, Et or OMe; R″=H, Me, Et or OMe

[chemical structure]

wherein B is a modified or unmodified nucleobase.

[0373] Exemplified sugar modifications include, but are not limited to the following:

[chemical structure]

wherein B is a modified or unmodified nucleobase.

[0374] In some embodiments the thermally destabilizing modification of the duplex is selected from the group consisting of:

[chemical structure]

wherein B is a modified or unmodified nucleobase and the asterisk on each structure represents either R, S or racemic.

[0375] In some embodiments the thermally destabilizing modification of the duplex is selected from the group consisting of:

[chemical structure]

wherein B is a modified or unmodified nucleobase and the asterisk represents either R, S or racemic (e.g. S).

[0376] The term “acyclic nucleotide” refers to any nucleotide having an acyclic ribose sugar, for example, where any of bonds between the ribose carbons (e.g., C1′-C2′, C2′-C3′, C3′-C4′, C4′-O4′, or C1′-O4′) is absent or at least one of ribose carbons or oxygen (e.g., C1′, C2′, C3′, C4′, or O4′) are independently or in combination absent from the nucleotide. In some embodiments, acyclic nucleotide is

[chemical structure]

wherein B is a modified or unmodified nucleobase, R¹ and R² independently are H, halogen, OR₃, or alkyl; and R₃ is H, alkyl, cycloalkyl, aryl, aralkyl, heteroaryl or sugar). The term “UNA” refers to unlocked acyclic nucleic acid, wherein any of the bonds of the sugar has been removed, forming an unlocked “sugar” residue. In one example, UNA also encompasses monomers with bonds between C1′-C4′ being removed (i.e. the covalent carbon-oxygen-carbon bond between the C1′ and C4′ carbons). In another example, the C2′-C3′ bond (i.e. the covalent carbon-carbon bond between the C2′ and C3′ carbons) of the sugar is removed (see Mikhailov et. al., Tetrahedron Letters, 26 (17): 2059 (1985); and Fluiter et al., Mol. Biosyst., 10: 1039 (2009), which are hereby incorporated by reference in their entirety). The acyclic derivative provides greater backbone flexibility without affecting the Watson-Crick pairings. The acyclic nucleotide can be linked via 2′-5′ or 3′-5′ linkage.

[0377] The term ‘GNA’ refers to glycol nucleic acid which is a polymer similar to DNA or RNA but differing in the composition of its “backbone” in that is composed of repeating glycerol units linked by phosphodiester bonds:

[chemical structure]

[0378] The thermally destabilizing modification of the duplex can be mismatches (i.e., noncomplementary base pairs) between the thermally destabilizing nucleotide and the opposing nucleotide in the opposite strand within the dsRNA duplex. Exemplary mismatch base pairs include G:G, G:A, G:U, G:T, A:A, A:C, C:C, C:U, C:T, U:U, T:T, U:T, or a combination thereof. Other mismatch base pairings known in the art are also amenable to the present invention. A mismatch can occur between nucleotides that are either naturally occurring nucleotides or modified nucleotides, i.e., the mismatch base pairing can occur between the nucleobases from respective nucleotides independent of the modifications on the ribose sugars of the nucleotides. In certain embodiments, the dsRNA molecule contains at least one nucleobase in the mismatch pairing that is a 2′-deoxy nucleobase; e.g., the 2′-deoxy nucleobase is in the sense strand.

[0379] In some embodiments, the thermally destabilizing modification of the duplex in the seed region of the antisense strand includes nucleotides with impaired Watson-Crick hydrogen-bonding W-C H-bonding to the complementary base on the target mRNA, such as modified nucleobases:

[chemical structure]

[0380] More examples of abasic nucleotide, acyclic nucleotide modifications (including UNA and GNA), and mismatch modifications have been described in detail in WO 2011/133876, which is herein incorporated by reference in its entirety.

The thermally destabilizing modifications may also include universal base with reduced or abolished capability to form hydrogen bonds with the opposing bases, and phosphate modifications.

[0381] In some embodiments, the thermally destabilizing modification of the duplex includes nucleotides with non-canonical bases such as, but not limited to, nucleobase modifications with impaired or completely abolished capability to form hydrogen bonds with bases in the opposite strand. These nucleobase modifications have been evaluated for destabilization of the central region of the dsRNA duplex as described in WO 2010/0011895, which is herein incorporated by reference in its entirety. Exemplary nucleobase modifications are:

[chemical structure]

[0382] In some embodiments, the thermally destabilizing modification of the duplex in the seed region of the antisense strand includes one or more a-nucleotide complementary to the base on the target mRNA, such as:

[chemical structure]

wherein R is H, OH, OCH₃, F, NH₂, NHMe, NMe₂ or O-alkyl.

[0383] Exemplary phosphate modifications known to decrease the thermal stability of dsRNA duplexes compared to natural phosphodiester linkages are:

[chemical structure]

[0384] The alkyl for the R group can be a C₁-C₆oalkyl. Specific alkyls for the R group include, but are not limited to methyl, ethyl, propyl, isopropyl, butyl, pentyl and hexyl.

[0385] As the skilled artisan will recognize, in view of the functional role of nucleobases is defining specificity of a RNAi agent of the disclosure, while nucleobase modifications can be performed in the various manners as described herein, e.g., to introduce destabilizing modifications into a RNAi agent of the disclosure, e.g., for purpose of enhancing on-target effect relative to off-target effect, the range of modifications available and, in general, present upon RNAi agents of the disclosure tends to be much greater for non-nucleobase modifications, e.g., modifications to sugar groups or phosphate backbones of polyribonucleotides. Such modifications are described in greater detail in other sections of the instant disclosure and are expressly contemplated for RNAi agents of the disclosure, either possessing native nucleobases or modified nucleobases as described above or elsewhere herein.

[0386] In addition to the antisense strand comprising a thermally destabilizing modification, the dsRNA can also comprise one or more stabilizing modifications. For example, the dsRNA can comprise at least two (e.g., two, three, four, five, six, seven, eight, nine, ten or more) stabilizing modifications. Without limitations, the stabilizing modifications all can be present in one strand. In some embodiments, both the sense and the antisense strands comprise at least two stabilizing modifications. The stabilizing modification can occur on any nucleotide of the sense strand or antisense strand. For instance, the stabilizing modification can occur on every nucleotide on the sense strand or antisense strand; each stabilizing modification can occur in an alternating pattern on the sense strand or antisense strand; or the sense strand or antisense strand comprises both stabilizing modification in an alternating pattern. The alternating pattern of the stabilizing modifications on the sense strand may be the same or different from the antisense strand, and the alternating pattern of the stabilizing modifications on the sense strand can have a shift relative to the alternating pattern of the stabilizing modifications on the antisense strand.

[0387] In some embodiments, the antisense strand comprises at least two (e.g., two, three, four, five, six, seven, eight, nine, ten or more) stabilizing modifications. Without limitations, a stabilizing modification in the antisense strand can be present at any positions. In some embodiments, the antisense comprises stabilizing modifications at positions 2, 6, 8, 9, 14, and 16 from the 5′-end. In some other embodiments, the antisense comprises stabilizing modifications at positions 2, 6, 14, and 16 from the 5′-end. In still some other embodiments, the antisense comprises stabilizing modifications at positions 2, 14, and 16 from the 5′-end.

[0388] In some embodiments, the antisense strand comprises at least one stabilizing modification adjacent to the destabilizing modification. For example, the stabilizing modification can be the nucleotide at the 5′-end or the 3′-end of the destabilizing modification, i.e., at position −1 or +1 from the position of the destabilizing modification. In some embodiments, the antisense strand comprises a stabilizing modification at each of the 5′-end and the 3′-end of the destabilizing modification, i.e., positions −1 and +1 from the position of the destabilizing modification.

[0389] In some embodiments, the antisense strand comprises at least two stabilizing modifications at the 3′-end of the destabilizing modification, i.e., at positions +1 and +2 from the position of the destabilizing modification.

[0390] In some embodiments, the sense strand comprises at least two (e.g., two, three, four, five, six, seven, eight, nine, ten or more) stabilizing modifications. Without limitations, a stabilizing modification in the sense strand can be present at any positions. In some embodiments, the sense strand comprises stabilizing modifications at positions 7, 10, and 11 from the 5′-end. In some other embodiments, the sense strand comprises stabilizing modifications at positions 7, 9, 10, and 11 from the 5′-end. In some embodiments, the sense strand comprises stabilizing modifications at positions opposite or complimentary to positions 11, 12, and 15 of the antisense strand, counting from the 5′-end of the antisense strand. In some other embodiments, the sense strand comprises stabilizing modifications at positions opposite or complimentary to positions 11, 12, 13, and 15 of the antisense strand, counting from the 5′-end of the antisense strand. In some embodiments, the sense strand comprises a block of two, three, or four stabilizing modifications.

[0391] In some embodiments, the sense strand does not comprise a stabilizing modification in position opposite or complimentary to the thermally destabilizing modification of the duplex in the antisense strand.

[0392] Exemplary thermally stabilizing modifications include, but are not limited to, 2′-fluoro modifications. Other thermally stabilizing modifications include, but are not limited to, LNA.

[0393] In some embodiments, the dsRNA of the disclosure comprises at least four (e.g., four, five, six, seven, eight, nine, ten, or more) 2′-fluoro nucleotides. Without limitations, the 2′-fluoro nucleotides all can be present in one strand. In some embodiments, both the sense and the antisense strands comprise at least two 2′-fluoro nucleotides. The 2′-fluoro modification can occur on any nucleotide of the sense strand or antisense strand. For instance, the 2′-fluoro modification can occur on every nucleotide on the sense strand or antisense strand; each 2′-fluoro modification can occur in an alternating pattern on the sense strand or antisense strand; or the sense strand or antisense strand comprises both 2′-fluoro modifications in an alternating pattern. The alternating pattern of the 2′-fluoro modifications on the sense strand may be the same or different from the antisense strand, and the alternating pattern of the 2′-fluoro modifications on the sense strand can have a shift relative to the alternating pattern of the 2′-fluoro modifications on the antisense strand.

[0394] In some embodiments, the antisense strand comprises at least two (e.g., two, three, four, five, six, seven, eight, nine, ten, or more) 2′-fluoro nucleotides. Without limitations, a 2′-fluoro modification in the antisense strand can be present at any positions. In some embodiments, the antisense comprises 2′-fluoro nucleotides at positions 2, 6, 8, 9, 14, and 16 from the 5′-end. In some other embodiments, the antisense comprises 2′-fluoro nucleotides at positions 2, 6, 14, and 16 from the 5′-end. In still some other embodiments, the antisense comprises 2′-fluoro nucleotides at positions 2, 14, and 16 from the 5′-end.

[0395] In some embodiments, the antisense strand comprises at least one 2′-fluoro nucleotide adjacent to the destabilizing modification. For example, the 2′-fluoro nucleotide can be the nucleotide at the 5′-end or the 3′-end of the destabilizing modification, i.e., at position -1 or +1 from the position of the destabilizing modification. In some embodiments, the antisense strand comprises a 2′-fluoro nucleotide at each of the 5′-end and the 3′-end of the destabilizing modification, i.e., positions −1 and +1 from the position of the destabilizing modification.

[0396] In some embodiments, the antisense strand comprises at least two 2′-fluoro nucleotides at the 3′-end of the destabilizing modification, i.e., at positions +1 and +2 from the position of the destabilizing modification.

[0397] In some embodiments, the sense strand comprises at least two (e.g., two, three, four, five, six, seven, eight, nine, ten, or more) 2′-fluoro nucleotides. Without limitations, a 2′-fluoro modification in the sense strand can be present at any positions. In some embodiments, the antisense comprises 2′-fluoro nucleotides at positions 7, 10, and 11 from the 5′-end. In some other embodiments, the sense strand comprises 2′-fluoro nucleotides at positions 7, 9, 10, and 11 from the 5′-end. In some embodiments, the sense strand comprises 2′-fluoro nucleotides at positions opposite or complimentary to positions 11, 12, and 15 of the antisense strand, counting from the 5′-end of the antisense strand. In some other embodiments, the sense strand comprises 2′-fluoro nucleotides at positions opposite or complimentary to positions 11, 12, 13, and 15 of the antisense strand, counting from the 5′-end of the antisense strand. In some embodiments, the sense strand comprises a block of two, three or four 2′-fluoro nucleotides.

[0398] In some embodiments, the sense strand does not comprise a 2′-fluoro nucleotide in position opposite or complimentary to the thermally destabilizing modification of the duplex in the antisense strand.

[0399] In some embodiments, the dsRNA molecule of the disclosure comprises a 21 nucleotides (nt) sense strand and a 23 nucleotides (nt) antisense, wherein the antisense strand contains at least one thermally destabilizing nucleotide, where the at least one thermally destabilizing nucleotide occurs in the seed region of the antisense strand (i.e., at position 2-9 of the 5′-end of the antisense strand), wherein one end of the dsRNA is blunt, while the other end is comprises a 2 nt overhang, and wherein the dsRNA optionally further has at least one (e.g., one, two, three, four, five, six or all seven) of the following characteristics: (i) the antisense comprises 2, 3, 4, 5, or 6 2′-fluoro modifications; (ii) the antisense comprises 1, 2, 3, 4, or 5 phosphorothioate internucleotide linkages; (iii) the sense strand is conjugated with a ligand; (iv) the sense strand comprises 2, 3, 4, or 5 2′-fluoro modifications; (v) the sense strand comprises 1, 2, 3, 4, or 5 phosphorothioate internucleotide linkages; (vi) the dsRNA comprises at least four 2′-fluoro modifications; and (vii) the dsRNA comprises a blunt end at 5′-end of the antisense strand. in one embodiment, the two nucleotide overhang is at the 3′-end of the antisense.

[0400] In some embodiments, the dsRNA molecule of the disclosure comprising a sense and antisense strands, wherein: the sense strand is 25-30 nucleotide residues in length, wherein starting from the 5′ terminal nucleotide (position 1), positions 1 to 23 of said sense strand comprise at least 8 ribonucleotides; antisense strand is 36-66 nucleotide residues in length and, starting from the 3′ terminal nucleotide, at least 8 ribonucleotides in the positions paired with positions 1-23 of sense strand to form a duplex; wherein at least the 3′ terminal nucleotide of antisense strand is unpaired with sense strand, and up to 6 consecutive 3′ terminal nucleotides are unpaired with sense strand, thereby forming a 3′ single stranded overhang of 1-6 nucleotides; wherein the 5′ terminus of antisense strand comprises from 10-30 consecutive nucleotides which are unpaired with sense strand, thereby forming a 10-30 nucleotide single stranded 5′ overhang; wherein at least the sense strand 5′ terminal and 3′ terminal nucleotides are base paired with nucleotides of antisense strand when sense and antisense strands are aligned for maximum complementarity, thereby forming a substantially duplexed region between sense and antisense strands; and antisense strand is sufficiently complementary to a target RNA along at least 19 ribonucleotides of antisense strand length to reduce target gene expression when said double stranded nucleic acid is introduced into a mammalian cell; and wherein the antisense strand contains at least one thermally destabilizing nucleotide, where at least one thermally destabilizing nucleotide is in the seed region of the antisense strand (i.e. at position 2-9 of the 5′-end of the antisense strand). For example, the thermally destabilizing nucleotide occurs between positions opposite or complimentary to positions 14-17 of the 5′-end of the sense strand, and wherein the dsRNA optionally further has at least one (e.g., one, two, three, four, five, six or all seven) of the following characteristics: (i) the antisense comprises 2, 3, 4, 5, or 6 2′-fluoro modifications; (ii) the antisense comprises 1, 2, 3, 4, or 5 phosphorothioate internucleotide linkages; (iii) the sense strand is conjugated with a ligand; (iv) the sense strand comprises 2, 3, 4, or 5 2′-fluoro modifications; (v) the sense strand comprises 1, 2, 3, 4, or 5 phosphorothioate internucleotide linkages; and (vi) the dsRNA comprises at least four 2′-fluoro modifications; and (vii) the dsRNA comprises a duplex region of 12-30 nucleotide pairs in length.

[0401] In some embodiments, the dsRNA molecule of the disclosure comprises a sense and antisense strands, wherein said dsRNA molecule comprises a sense strand having a length which is at least 25 and at most 29 nucleotides and an antisense strand having a length which is at most 30 nucleotides with the sense strand comprises a modified nucleotide that is susceptible to enzymatic degradation at position 11 from the 5′end, wherein the 3′ end of said sense strand and the 5′ end of said antisense strand form a blunt end and said antisense strand is 1-4 nucleotides longer at its 3′ end than the sense strand, wherein the duplex region which is at least 25 nucleotides in length, and said antisense strand is sufficiently complementary to a target mRNA along at least 19 nt of said antisense strand length to reduce target gene expression when said dsRNA molecule is introduced into a mammalian cell, and wherein dicer cleavage of said dsRNA results in an siRNA comprising said 3′ end of said antisense strand, thereby reducing expression of the target gene in the mammal, wherein the antisense strand contains at least one thermally destabilizing nucleotide, where the at least one thermally destabilizing nucleotide is in the seed region of the antisense strand (i.e. at position 2-9 of the 5′-end of the antisense strand), and wherein the dsRNA optionally further has at least one (e.g., one, two, three, four, five, six or all seven) of the following characteristics: (i) the antisense comprises 2, 3, 4, 5, or 6 2′-fluoro modifications; (ii) the antisense comprises 1, 2, 3, 4, or 5 phosphorothioate internucleotide linkages; (iii) the sense strand is conjugated with a ligand; (iv) the sense strand comprises 2, 3, 4, or 5 2′-fluoro modifications; (v) the sense strand comprises 1, 2, 3, 4, or 5 phosphorothioate internucleotide linkages; and (vi) the dsRNA comprises at least four 2′-fluoro modifications; and (vii) the dsRNA has a duplex region of 12-29 nucleotide pairs in length.

[0402] In some embodiments, every nucleotide in the sense strand and antisense strand of the dsRNA molecule may be modified. Each nucleotide may be modified with the same or different modification which can include one or more alteration of one or both of the non-linking phosphate oxygens or of one or more of the linking phosphate oxygens; alteration of a constituent of the ribose sugar, e.g., of the 2′ hydroxyl on the ribose sugar; wholesale replacement of the phosphate moicty with “dephospho” linkers; modification or replacement of a naturally occurring base; and replacement or modification of the ribose-phosphate backbone.

[0403] As nucleic acids are polymers of subunits, many of the modifications occur at a position which is repeated within a nucleic acid, e.g., a modification of a base, or a phosphate moicty, or a non-linking O of a phosphate moicty. In some cases, the modification will occur at all of the subject positions in the nucleic acid but in many cases it will not. By way of example, a modification may only occur at a 3′ or 5′ terminal position, may only occur in a terminal region, e.g., at a position on a terminal nucleotide or in the last 2, 3, 4, 5, or 10 nucleotides of a strand. A modification may occur in a double strand region, a single strand region, or in both. A modification may occur only in the double strand region of an RNA or may only occur in a single strand region of an RNA. e.g., a phosphorothioate modification at a non-linking O position may only occur at one or both termini, may only occur in a terminal region, e.g., at a position on a terminal nucleotide or in the last 2, 3, 4, 5, or 10 nucleotides of a strand, or may occur in double strand and single strand regions, particularly at termini. The 5′ end or ends can be phosphorylated.

[0404] It may be possible, e.g., to enhance stability, to include particular bases in overhangs, or to include modified nucleotides or nucleotide surrogates, in single strand overhangs, e.g., in a 5′ or 3′ overhang, or in both. E.g., it can be desirable to include purine nucleotides in overhangs. In some embodiments all or some of the bases in a 3′ or 5′ overhang may be modified, e.g., with a modification described herein. Modifications can include, e.g., the use of modifications at the 2′ position of the ribose sugar with modifications that are known in the art, e.g., the use of deoxyribonucleotides, 2′-deoxy-2′-fluoro (2′-F) or 2′-O-methyl modified instead of the ribosugar of the nucleobase, and modifications in the phosphate group, e.g., phosphorothioate modifications. Overhangs need not be homologous with the target sequence.

[0405] In some embodiments, each residue of the sense strand and antisense strand is independently modified with LNA, glycol nucleic acid (GNA), hexitol nucleic acid (HNA), 2′-methoxyethyl, 2′-O-methyl, 2′-O-allyl, 2′-C-allyl, 2′-deoxy, or 2′-fluoro. The strands can contain more than one modification. In some embodiments, each residue of the sense strand and antisense strand is independently modified with 2′-O-methyl or 2′-fluoro. It is to be understood that these modifications are in addition to the at least one thermally destabilizing modification of the duplex present in the antisense strand.

[0406] At least two different modifications are typically present on the sense strand and antisense strand. Those two modifications may be the 2′-deoxy, 2′-O-methyl or 2′-fluoro modifications, acyclic nucleotides or others. In some embodiments, the sense strand and antisense strand each comprises two differently modified nucleotides selected from 2′-O-methyl or 2′-deoxy. In some embodiments, each residue of the sense strand and antisense strand is independently modified with 2′-O-methyl nucleotide, 2′-deoxy nucleotide, 2′-deoxy-2′-fluoro nucleotide, 2′-O-N-methylacetamido (2′-O—NMA, 2′O—CH2C(O)N(Me)H) nucleotide, a 2′-O-dimethylaminoethoxyethyl (2′-O-DMAEOE) nucleotide, 2′-O-aminopropyl (2′-O-AP) nucleotide, or 2′-ara-F nucleotide. Again, it is to be understood that these modifications are in addition to the at least one thermally destabilizing modification of the duplex present in the antisense strand.

[0407] In some embodiments, the dsRNA molecule of the disclosure comprises modifications of an alternating pattern. The term “alternating motif” or “alternative pattern” as used herein refers to a motif having one or more modifications, each modification occurring on alternating nucleotides of one strand. The alternating nucleotide may refer to one per every other nucleotide or one per every three nucleotides, or a similar pattern. For example, if A, B and C each represent one type of modification to the nucleotide, the alternating motif can be “ABABABABABAB . . . , ” “AABBAABBAABB . . . , ” “AABAABAABAAB . . . , ” “AAABAAABAAAB . . . ,”

[0408] “AAABBBAAABBB . . . , ” or “ABCABCABCABC . . . , ” etc.

The type of modifications contained in the alternating motif may be the same or different. For example, if A, B, C, D each represent one type of modification on the nucleotide, the alternating pattern, i.e., modifications on every other nucleotide, may be the same, but each of the sense strand or antisense strand can be selected from several possibilities of modifications within the alternating motif such as “ABABAB . . . ”, “ACACAC . . . ” “BDBDBD . . . ” or “CDCDCD . . . , ” etc.

[0409] In some embodiments, the dsRNA molecule of the disclosure comprises the modification pattern for the alternating motif on the sense strand relative to the modification pattern for the alternating motif on the antisense strand is shifted. The shift may be such that the modified group of nucleotides of the sense strand corresponds to a differently modified group of nucleotides of the antisense strand and vice versa. For example, the sense strand when paired with the antisense strand in the dsRNA duplex, the alternating motif in the sense strand may start with “ABABAB” from 5′-3′ of the strand and the alternating motif in the antisense strand may start with “BABABA” from 3′-5′of the strand within the duplex region. As another example, the alternating motif in the sense strand may start with “AABBAABB” from 5′-3′ of the strand and the alternating motif in the antisense strand may start with “BBAABBAA” from 3′-5′of the strand within the duplex region, so that there is a complete or partial shift of the modification patterns between the sense strand and the antisense strand.

[0410] In one particular example, the alternating motif in the sense strand is “ABABAB” sfrom 5′ 3′ of the strand, where each A is an unmodified ribonucleotide and each B is a 2′-Omethyl modified nucleotide.

[0411] In one particular example, the alternating motif in the sense strand is “ABABAB” sfrom 5′ 3′ of the strand, where each A is an 2′-deoxy-2′-fluoro modified nucleotide and each B is a 2′-Omethyl modified nucleotide.

[0412] In another particular example, the alternating motif in the antisense strand is “BABABA” from 3′-5′of the strand, where each A is a 2′-deoxy-2′-fluoro modified nucleotide and each B is a 2′-Omethyl modified nucleotide.

[0413] In one particular example, the alternating motif in the sense strand is “ABABAB”s from 5′ 3′ of the strand and the alternating motif in the antisense strand is “BABABA” from 3′-5′of the strand, where each A is an unmodified ribonucleotide and each B is a 2′-Omethyl modified nucleotide.

[0414] In one particular example, the alternating motif in the sense strand is “ABABAB”s from 5′ 3′ of the strand and the alternating motif in the antisense strand is “BABABA” from 3′-5′of the strand, where each A is a 2′-deoxy-2′-fluoro modified nucleotide and each B is a 2′-Omethyl modified nucleotide.

[0415] The dsRNA molecule of the disclosure may further comprise at least one phosphorothioate or methylphosphonate internucleotide linkage. The phosphorothioate or methylphosphonate internucleotide linkage modification may occur on any nucleotide of the sense strand or antisense strand or both in any position of the strand. For instance, the internucleotide linkage modification may occur on every nucleotide on the sense strand or antisense strand; each internucleotide linkage modification may occur in an alternating pattern on the sense strand or antisense strand; or the sense strand or antisense strand comprises both internucleotide linkage modifications in an alternating pattern. The alternating pattern of the internucleotide linkage modification on the sense strand may be the same or different from the antisense strand, and the alternating pattern of the internucleotide linkage modification on the sense strand may have a shift relative to the alternating pattern of the internucleotide linkage modification on the antisense strand.

[0416] In some embodiments, the dsRNA molecule comprises the phosphorothioate or methylphosphonate internucleotide linkage modification in the overhang region. For example, the overhang region comprises two nucleotides having a phosphorothioate or methylphosphonate internucleotide linkage between the two nucleotides. Internucleotide linkage modifications also may be made to link the overhang nucleotides with the terminal paired nucleotides within duplex region. For example, at least 2, 3, 4, or all the overhang nucleotides may be linked through phosphorothioate or methylphosphonate internucleotide linkage, and optionally, there may be additional phosphorothioate or methylphosphonate internucleotide linkages linking the overhang nucleotide with a paired nucleotide that is next to the overhang nucleotide. For instance, there may be at least two phosphorothioate internucleotide linkages between the terminal three nucleotides, in which two of the three nucleotides are overhang nucleotides, and the third is a paired nucleotide next to the overhang nucleotide. In one embodiment, these terminal three nucleotides may be at the 3′-end of the antisense strand.

[0417] In some embodiments, the sense strand of the dsRNA molecule comprises 1-10 blocks of two to ten phosphorothioate or methylphosphonate internucleotide linkages separated by 1, 2, 3, 4, 5, 6, 7, 8, 9, 10, 11, 12, 13, 14, 15, or 16 phosphate internucleotide linkages, wherein one of the phosphorothioate or methylphosphonate internucleotide linkages is placed at any position in the oligonucleotide sequence and the said sense strand is paired with an antisense strand comprising any combination of phosphorothioate, methylphosphonate and phosphate internucleotide linkages or an antisense strand comprising either phosphorothioate or methylphosphonate or phosphate linkage.

[0418] In some embodiments, the antisense strand of the dsRNA molecule comprises two blocks of two phosphorothioate or methylphosphonate internucleotide linkages separated by 1, 2, 3, 4, 5, 6, 7, 8, 9, 10, 11, 12, 13, 14, 15, 16, 17, or 18 phosphate internucleotide linkages, wherein one of the phosphorothioate or methylphosphonate internucleotide linkages is placed at any position in the oligonucleotide sequence and the said antisense strand is paired with a sense strand comprising any combination of phosphorothioate, methylphosphonate and phosphate internucleotide linkages or an antisense strand comprising either phosphorothioate or methylphosphonate or phosphate linkage.

[0419] In some embodiments, the antisense strand of the dsRNA molecule comprises two blocks of three phosphorothioate or methylphosphonate internucleotide linkages separated by 1, 2, 3, 4, 5, 6, 7, 8, 9, 10, 11, 12, 13, 14, 15, or 16 phosphate internucleotide linkages, wherein one of the phosphorothioate or methylphosphonate internucleotide linkages is placed at any position in the oligonucleotide sequence and the said antisense strand is paired with a sense strand comprising any combination of phosphorothioate, methylphosphonate and phosphate internucleotide linkages or an antisense strand comprising either phosphorothioate or methylphosphonate or phosphate linkage.

[0420] In some embodiments, the antisense strand of the dsRNA molecule comprises two blocks of four phosphorothioate or methylphosphonate internucleotide linkages separated by 1, 2, 3, 4, 5, 6, 7, 8, 9, 10, 11, 12, 13, or 14 phosphate internucleotide linkages, wherein one of the phosphorothioate or methylphosphonate internucleotide linkages is placed at any position in the oligonucleotide sequence and the said antisense strand is paired with a sense strand comprising any combination of phosphorothioate, methylphosphonate and phosphate internucleotide linkages or an antisense strand comprising either phosphorothioate or methylphosphonate or phosphate linkage.

[0421] In some embodiments, the antisense strand of the dsRNA molecule comprises two blocks of five phosphorothioate or methylphosphonate internucleotide linkages separated by 1, 2, 3, 4, 5, 6, 7, 8, 9, 10, 11, or 12 phosphate internucleotide linkages, wherein one of the phosphorothioate or methylphosphonate internucleotide linkages is placed at any position in the oligonucleotide sequence and the said antisense strand is paired with a sense strand comprising any combination of phosphorothioate, methylphosphonate and phosphate internucleotide linkages or an antisense strand comprising either phosphorothioate or methylphosphonate or phosphate linkage.

[0422] In some embodiments, the antisense strand of the dsRNA molecule comprises two blocks of six phosphorothioate or methylphosphonate internucleotide linkages separated by 1, 2, 3, 4, 5, 6, 7, 8, 9, or 10 phosphate internucleotide linkages, wherein one of the phosphorothioate or methylphosphonate internucleotide linkages is placed at any position in the oligonucleotide sequence and the said antisense strand is paired with a sense strand comprising any combination of phosphorothioate, methylphosphonate and phosphate internucleotide linkages or an antisense strand comprising either phosphorothioate or methylphosphonate or phosphate linkage.

[0423] In some embodiments, the antisense strand of the dsRNA molecule comprises two blocks of seven phosphorothioate or methylphosphonate internucleotide linkages separated by 1, 2, 3, 4, 5, 6, 7, or 8 phosphate internucleotide linkages, wherein one of the phosphorothioate or methylphosphonate internucleotide linkages is placed at any position in the oligonucleotide sequence and the said antisense strand is paired with a sense strand comprising any combination of phosphorothioate. methylphosphonate and phosphate internucleotide linkages or an antisense strand comprising either phosphorothioate or methylphosphonate or phosphate linkage.

[0424] In some embodiments, the antisense strand of the dsRNA molecule comprises two blocks of eight phosphorothioate or methylphosphonate internucleotide linkages separated by 1, 2, 3, 4, 5, or 6 phosphate internucleotide linkages, wherein one of the phosphorothioate or methylphosphonate internucleotide linkages is placed at any position in the oligonucleotide sequence and the said antisense strand is paired with a sense strand comprising any combination of phosphorothioate, methylphosphonate and phosphate internucleotide linkages or an antisense strand comprising cither phosphorothioate or methylphosphonate or phosphate linkage.

[0425] In some embodiments, the antisense strand of the dsRNA molecule comprises two blocks of nine phosphorothioate or methylphosphonate internucleotide linkages separated by 1, 2, 3, or 4 phosphate internucleotide linkages, wherein one of the phosphorothioate or methylphosphonate internucleotide linkages is placed at any position in the oligonucleotide sequence and the said antisense strand is paired with a sense strand comprising any combination of phosphorothioate. methylphosphonate and phosphate internucleotide linkages or an antisense strand comprising either phosphorothioate or methylphosphonate or phosphate linkage.

[0426] In some embodiments, the dsRNA molecule of the disclosure further comprises one or more phosphorothioate or methylphosphonate internucleotide linkage modification within 1-10 nucleotides of the termini position(s) of the sense or antisense strand. For example, at least 2, 3, 4, 5, 6, 7, 8, 9, or 10 nucleotides may be linked through phosphorothioate or methylphosphonate internucleotide linkage at one end or both ends of the sense or antisense strand.

[0427] In some embodiments, the dsRNA molecule of the disclosure further comprises one or more phosphorothioate or methylphosphonate internucleotide linkage modification within 1-10 nucleotides of the internal region of the duplex of each of the sense or antisense strand. For example, at least 2, 3, 4, 5, 6, 7, 8, 9, or 10 nucleotides may be linked through phosphorothioate or methylphosphonate internucleotide linkage at position 8-16 of the duplex region counting from the 5′-end of the sense strand; the dsRNA molecule can optionally further comprise one or more phosphorothioate or methylphosphonate internucleotide linkage modification within 1-10 of the termini position(s).

[0428] In some embodiments, the dsRNA molecule of the disclosure further comprises one to five phosphorothioate or methylphosphonate internucleotide linkage modification(s) within position 1-5 and one to five phosphorothioate or methylphosphonate internucleotide linkage modification(s) within position 18-23 of the sense strand (counting from the 5′-end), and one to two phosphorothioate or methylphosphonate internucleotide linkage modification at positions 1 and 2 and one to five within positions 18-23 of the antisense strand (counting from the 5′-end).

[0429] In some embodiments, the dsRNA molecule of the disclosure further comprises one phosphorothioate internucleotide linkage modification within position 1-5 and one phosphorothioate or methylphosphonate internucleotide linkage modification within position 18-23 of the sense strand (counting from the 5′-end), and one phosphorothioate internucleotide linkage modification at positions 1 or 2 and two phosphorothioate or methylphosphonate internucleotide linkage modifications within positions 18-23 of the antisense strand (counting from the 5′-end).

[0430] In some embodiments, the dsRNA molecule of the disclosure further comprises two phosphorothioate internucleotide linkage modifications within position 1-5 and one phosphorothioate internucleotide linkage modification within position 18-23 of the sense strand (counting from the 5′-end), and one phosphorothioate internucleotide linkage modification at positions 1 and 2 and two phosphorothioate internucleotide linkage modifications within positions 18-23 of the antisense strand (counting from the 5′-end).

[0431] In some embodiments, the dsRNA molecule of the disclosure further comprises two phosphorothioate internucleotide linkage modifications within position 1-5 and two phosphorothioate internucleotide linkage modifications within position 18-23 of the sense strand (counting from the 5′-end), and one phosphorothioate internucleotide linkage modification at positions 1 and 2 and two phosphorothioate internucleotide linkage modifications within positions 18-23 of the antisense strand (counting from the 5′-end).

[0432] In some embodiments, the dsRNA molecule of the disclosure further comprises two phosphorothioate internucleotide linkage modifications within position 1-5 and two phosphorothioate internucleotide linkage modifications within position 18-23 of the sense strand (counting from the 5′-end), and one phosphorothioate internucleotide linkage modification at positions 1 and 2 and one phosphorothioate internucleotide linkage modification within positions 18-23 of the antisense strand (counting from the 5′-end).

[0433] In some embodiments, the dsRNA molecule of the disclosure further comprises one phosphorothioate internucleotide linkage modification within position 1-5 and one phosphorothioate internucleotide linkage modification within position 18-23 of the sense strand (counting from the 5′-end), and two phosphorothioate internucleotide linkage modifications at positions 1 and 2 and two phosphorothioate internucleotide linkage modifications within positions 18-23 of the antisense strand (counting from the 5′-end).

[0434] In some embodiments, the dsRNA molecule of the disclosure further comprises one phosphorothioate internucleotide linkage modification within position 1-5 and one within position 18-23 of the sense strand (counting from the 5′-end), and two phosphorothioate internucleotide linkage modification at positions 1 and 2 and one phosphorothioate internucleotide linkage modification within positions 18-23 of the antisense strand (counting from the 5′-end).

[0435] In some embodiments, the dsRNA molecule of the disclosure further comprises one phosphorothioate internucleotide linkage modification within position 1-5 (counting from the 5′-end) of the sense strand, and two phosphorothioate internucleotide linkage modifications at positions 1 and 2 and one phosphorothioate internucleotide linkage modification within positions 18-23 of the antisense strand (counting from the 5′-end).

[0436] In some embodiments, the dsRNA molecule of the disclosure further comprises two phosphorothioate internucleotide linkage modifications within position 1-5 (counting from the 5′-end) of the sense strand, and one phosphorothioate internucleotide linkage modification at positions 1 and 2 and two phosphorothioate internucleotide linkage modifications within positions 18-23 of the antisense strand (counting from the 5′-end).

[0437] In some embodiments, the dsRNA molecule of the disclosure further comprises two phosphorothioate internucleotide linkage modifications within position 1-5 and one within position 18-23 of the sense strand (counting from the 5′-end), and two phosphorothioate internucleotide linkage modifications at positions 1 and 2 and one phosphorothioate internucleotide linkage modification within positions 18-23 of the antisense strand (counting from the 5′-end). In some embodiments, the dsRNA molecule of the disclosure further comprises two phosphorothioate internucleotide linkage modifications within position 1-5 and one phosphorothioate internucleotide linkage modification within position 18-23 of the sense strand (counting from the 5′-end), and two phosphorothioate internucleotide linkage modifications at positions 1 and 2 and two phosphorothioate internucleotide linkage modifications within positions 18-23 of the antisense strand (counting from the 5′-end).

[0438] In some embodiments, the dsRNA molecule of the disclosure further comprises two phosphorothioate internucleotide linkage modifications within position 1-5 and one phosphorothioate internucleotide linkage modification within position 18-23 of the sense strand (counting from the 5′-end), and one phosphorothioate internucleotide linkage modification at positions 1 and 2 and two phosphorothioate internucleotide linkage modifications within positions 18-23 of the antisense strand (counting from the 5′-end).

[0439] In some embodiments, the dsRNA molecule of the disclosure further comprises two phosphorothioate internucleotide linkage modifications at position 1 and 2, and two phosphorothioate internucleotide linkage modifications at position 20 and 21 of the sense strand (counting from the 5′-end), and one phosphorothioate internucleotide linkage modification at positions 1 and one at position 21 of the antisense strand (counting from the 5′-end).

[0440] In some embodiments, the dsRNA molecule of the disclosure further comprises one phosphorothioate internucleotide linkage modification at position 1, and one phosphorothioate internucleotide linkage modification at position 21 of the sense strand (counting from the 5′-end), and two phosphorothioate internucleotide linkage modifications at positions 1 and 2 and two phosphorothioate internucleotide linkage modifications at positions 20 and 21 the antisense strand (counting from the 5′-end).

[0441] In some embodiments, the dsRNA molecule of the disclosure further comprises two phosphorothioate internucleotide linkage modifications at position 1 and 2, and two phosphorothioate internucleotide linkage modifications at position 21 and 22 of the sense strand (counting from the 5′-end), and one phosphorothioate internucleotide linkage modification at positions 1 and one phosphorothioate internucleotide linkage modification at position 21 of the antisense strand (counting from the 5′-end).

[0442] In some embodiments, the dsRNA molecule of the disclosure further comprises one phosphorothioate internucleotide linkage modification at position 1, and one phosphorothioate internucleotide linkage modification at position 21 of the sense strand (counting from the 5′-end), and two phosphorothioate internucleotide linkage modifications at positions 1 and 2 and two phosphorothioate internucleotide linkage modifications at positions 21 and 22 the antisense strand (counting from the 5′-end).

[0443] In some embodiments, the dsRNA molecule of the disclosure further comprises two phosphorothioate internucleotide linkage modifications at position 1 and 2, and two phosphorothioate internucleotide linkage modifications at position 22 and 23 of the sense strand (counting from the 5′-end), and one phosphorothioate internucleotide linkage modification at positions 1 and one phosphorothioate internucleotide linkage modification at position 21 of the antisense strand (counting from the 5′-end).

[0444] In some embodiments, the dsRNA molecule of the disclosure further comprises one phosphorothioate internucleotide linkage modification at position 1, and one phosphorothioate internucleotide linkage modification at position 21 of the sense strand (counting from the 5′-end), and two phosphorothioate internucleotide linkage modifications at positions 1 and 2 and two phosphorothioate internucleotide linkage modifications at positions 23 and 23 the antisense strand (counting from the 5′-end).

[0445] In some embodiments, compound of the disclosure comprises a pattern of backbone chiral centers. In some embodiments, a common pattern of backbone chiral centers comprises at least 5 internucleotidic linkages in the Sp configuration. In some embodiments, a common pattern of backbone chiral centers comprises at least 6 internucleotidic linkages in the Sp configuration. In some embodiments, a common pattern of backbone chiral centers comprises at least 7 internucleotidic linkages in the Sp configuration. In some embodiments, a common pattern of backbone chiral centers comprises at least 8 internucleotidic linkages in the Sp configuration. In some embodiments, a common pattern of backbone chiral centers comprises at least 9 internucleotidic linkages in the Sp configuration. In some embodiments, a common pattern of backbone chiral centers comprises at least 10 internucleotidic linkages in the Sp configuration. In some embodiments, a common pattern of backbone chiral centers comprises at least 11 internucleotidic linkages in the Sp configuration. In some embodiments, a common pattern of backbone chiral centers comprises at least 12 internucleotidic linkages in the Sp configuration. In some embodiments, a common pattern of backbone chiral centers comprises at least 13 internucleotidic linkages in the Sp configuration. In some embodiments, a common pattern of backbone chiral centers comprises at least 14 internucleotidic linkages in the Sp configuration. In some embodiments, a common pattern of backbone chiral centers comprises at least 15 internucleotidic linkages in the Sp configuration. In some embodiments, a common pattern of backbone chiral centers comprises at least 16 internucleotidic linkages in the Sp configuration. In some embodiments, a common pattern of backbone chiral centers comprises at least 17 internucleotidic linkages in the Sp configuration. In some embodiments, a common pattern of backbone chiral centers comprises at least 18 internucleotidic linkages in the Sp configuration. In some embodiments, a common pattern of backbone chiral centers comprises at least 19 internucleotidic linkages in the Sp configuration. In some embodiments, a common pattern of backbone chiral centers comprises no more than 8 internucleotidic linkages in the Rp configuration. In some embodiments, a common pattern of backbone chiral centers comprises no more than 7 internucleotidic linkages in the Rp configuration. In some embodiments, a common pattern of backbone chiral centers comprises no more than 6 internucleotidic linkages in the Rp configuration. In some embodiments, a common pattern of backbone chiral centers comprises no more than 5 internucleotidic linkages in the Rp configuration. In some embodiments, a common pattern of backbone chiral centers comprises no more than 4 internucleotidic linkages in the Rp configuration. In some embodiments, a common pattern of backbone chiral centers comprises no more than 3 internucleotidic linkages in the Rp configuration. In some embodiments, a common pattern of backbone chiral centers comprises no more than 2 internucleotidic linkages in the Rp configuration. In some embodiments, a common pattern of backbone chiral centers comprises no more than 1 internucleotidic linkages in the Rp configuration. In some embodiments, a common pattern of backbone chiral centers comprises no more than 8 internucleotidic linkages which are not chiral (as a non-limiting example, a phosphodiester). In some embodiments, a common pattern of backbone chiral centers comprises no more than 7 internucleotidic linkages which are not chiral. In some embodiments, a common pattern of backbone chiral centers comprises no more than 6 internucleotidic linkages which are not chiral. In some embodiments, a common pattern of backbone chiral centers comprises no more than 5 internucleotidic linkages which are not chiral. In some embodiments, a common pattern of backbone chiral centers comprises no more than 4 internucleotidic linkages which are not chiral. In some embodiments, a common pattern of backbone chiral centers comprises no more than 3 internucleotidic linkages which are not chiral. In some embodiments, a common pattern of backbone chiral centers comprises no more than 2 internucleotidic linkages which are not chiral. In some embodiments, a common pattern of backbone chiral centers comprises no more than 1 internucleotidic linkages which are not chiral. In some embodiments, a common pattern of backbone chiral centers comprises at least 10 internucleotidic linkages in the Sp configuration, and no more than 8 internucleotidic linkages which are not chiral. In some embodiments, a common pattern of backbone chiral centers comprises at least 11 internucleotidic linkages in the Sp configuration, and no more than 7 internucleotidic linkages which are not chiral. In some embodiments, a common pattern of backbone chiral centers comprises at least 12 internucleotidic linkages in the Sp configuration, and no more than 6 internucleotidic linkages which are not chiral. In some embodiments, a common pattern of backbone chiral centers comprises at least 13 internucleotidic linkages in the Sp configuration, and no more than 6 internucleotidic linkages which are not chiral. In some embodiments, a common pattern of backbone chiral centers comprises at least 14 internucleotidic linkages in the Sp configuration, and no more than 5 internucleotidic linkages which are not chiral. In some embodiments, a common pattern of backbone chiral centers comprises at least 15 internucleotidic linkages in the Sp configuration, and no more than 4 internucleotidic linkages which are not chiral. In some embodiments, the internucleotidic linkages in the Sp configuration are optionally contiguous or not contiguous. In some embodiments, the internucleotidic linkages in the Rp configuration are optionally contiguous or not contiguous. In some embodiments, the internucleotidic linkages which are not chiral are optionally contiguous or not contiguous.

[0446] In some embodiments, compound of the disclosure comprises a block is a stereochemistry block. In some embodiments, a block is an Rp block in that each internucleotidic linkage of the block is Rp. In some embodiments, a 5′-block is an Rp block. In some embodiments, a 3′-block is an Rp block. In some embodiments, a block is an Sp block in that each internucleotidic linkage of the block is Sp. In some embodiments, a 5′-block is an Sp block. In some embodiments, a 3′-block is an Sp block. In some embodiments, provided oligonucleotides comprise both Rp and Sp blocks. In some embodiments, provided oligonucleotides comprise one or more Rp but no Sp blocks. In some embodiments, provided oligonucleotides comprise one or more Sp but no Rp blocks. In some embodiments, provided oligonucleotides comprise one or more PO blocks wherein cach internucleotidic linkage in a natural phosphate linkage.

[0447] In some embodiments, compound of the disclosure comprises a 5′-block is an Sp block wherein cach sugar moiety comprises a 2′-F modification. In some embodiments, a 5′-block is an Sp block wherein each of internucleotidic linkage is a modified internucleotidic linkage and cach sugar moicty comprises a 2′-F modification. In some embodiments, a 5′-block is an Sp block wherein cach of internucleotidic linkage is a phosphorothioate linkage and each sugar moiety comprises a 2′-F modification. In some embodiments, a 5′-block comprises 4 or more nucleoside units. In some embodiments, a 5′-block comprises 5 or more nucleoside units. In some embodiments, a 5′-block comprises 6 or more nucleoside units. In some embodiments, a 5′-block comprises 7 or more nucleoside units. In some embodiments, a 3′-block is an Sp block wherein cach sugar moicty comprises a 2′-F modification. In some embodiments, a 3′-block is an Sp block wherein cach of internucleotidic linkage is a modified internucleotidic linkage and each sugar moiety comprises a 2′-F modification. In some embodiments, a 3′-block is an Sp block wherein each of internucleotidic linkage is a phosphorothioate linkage and each sugar moicty comprises a 2′-F modification. In some embodiments, a 3′-block comprises 4 or more nucleoside units. In some embodiments, a 3′-block comprises 5 or more nucleoside units. In some embodiments, a 3′-block comprises 6 or more nucleoside units. In some embodiments, a 3′-block comprises 7 or more nucleoside units.

[0448] In some embodiments, compound of the disclosure comprises a type of nucleoside in a region or an oligonucleotide is followed by a specific type of internucleotidic linkage, e.g., natural phosphate linkage, modified internucleotidic linkage, Rp chiral internucleotidic linkage, Sp chiral internucleotidic linkage, etc. In some embodiments, A is followed by Sp. In some embodiments, A is followed by Rp. In some embodiments, A is followed by natural phosphate linkage (PO). In some embodiments, U is followed by Sp. In some embodiments, U is followed by Rp. In some embodiments, U is followed by natural phosphate linkage (PO). In some embodiments, C is followed by Sp. In some embodiments, C is followed by Rp. In some embodiments, C is followed by natural phosphate linkage (PO). In some embodiments, G is followed by Sp. In some embodiments, G is followed by Rp. In some embodiments, G is followed by natural phosphate linkage (PO). In some embodiments, C and U are followed by Sp. In some embodiments, C and U are followed by Rp. In some embodiments, C and U are followed by natural phosphate linkage (PO). In some embodiments, A and G are followed by Sp. In some embodiments, A and G are followed by Rp.

[0449] In some embodiments, the antisense strand comprises phosphorothioate internucleotide linkages between nucleotide positions 21 and 22, and between nucleotide positions 22 and 23, wherein the antisense strand contains at least one thermally destabilizing modification of the duplex located in the seed region of the antisense strand (i.e., at position 2-9 of the 5′-end of the antisense strand), and wherein the dsRNA optionally further has at least one (e.g., one, two, three, four, five, six, seven or all eight) of the following characteristics: (i) the antisense comprises 2, 3, 4, 5, or 6 2′-fluoro modifications; (ii) the antisense comprises 3, 4, or 5 phosphorothioate internucleotide linkages; (iii) the sense strand is conjugated with a ligand; (iv) the sense strand comprises 2, 3, 4 or 5 2′-fluoro modifications; (v) the sense strand comprises 1, 2, 3, 4, or 5 phosphorothioate internucleotide linkages; (vi) the dsRNA comprises at least four 2′-fluoro modifications; (vii) the dsRNA comprises a duplex region of 12-40 nucleotide pairs in length; and (viii) the dsRNA has a blunt end at 5′-end of the antisense strand.

In some embodiments, the antisense strand comprises phosphorothioate internucleotide linkages between nucleotide positions 1 and 2, between nucleotide positions 2 and 3, between nucleotide positions 21 and 22, and between nucleotide positions 22 and 23, wherein the antisense strand contains at least one thermally destabilizing modification of the duplex located in the seed region of the antisense strand (i.e., at position 2-9 of the 5′-end of the antisense strand), and wherein the dsRNA optionally further has at least one (e.g., one, two, three, four, five, six, seven or all eight) of the following characteristics: (i) the antisense comprises 2, 3, 4, 5, or 6 2′-fluoro modifications; (ii) the sense strand is conjugated with a ligand; (iii) the sense strand comprises 2, 3, 4 or 5 2′-fluoro modifications; (iv) the sense strand comprises 1, 2, 3, 4, or 5 phosphorothioate internucleotide linkages; (v) the dsRNA comprises at least four 2′-fluoro modifications; (vi) the dsRNA comprises a duplex region of 12-40 nucleotide pairs in length; (vii) the dsRNA comprises a duplex region of 12-40 nucleotide pairs in length; and (viii) the dsRNA has a blunt end at 5′-end of the antisense strand.

[0450] In some embodiments, the sense strand comprises phosphorothioate internucleotide linkages between nucleotide positions 1 and 2, and between nucleotide positions 2 and 3, wherein the antisense strand contains at least one thermally destabilizing modification of the duplex located in the seed region of the antisense strand (i.e., at position 2-9 of the 5′-end of the antisense strand), and wherein the dsRNA optionally further has at least one (e.g., one, two, three, four, five, six, seven or all eight) of the following characteristics: (i) the antisense comprises 2, 3, 4, 5, or 6 2′-fluoro modifications; (ii) the antisense comprises 1, 2, 3, 4, or 5 phosphorothioate internucleotide linkages; (iii) the sense strand is conjugated with a ligand; (iv) the sense strand comprises 2, 3, 4 or 5 2′-fluoro modifications; (v) the sense strand comprises 3, 4 or 5 phosphorothioate internucleotide linkages; (vi) the dsRNA comprises at least four 2′-fluoro modifications; (vii) the dsRNA comprises a duplex region of 12-40 nucleotide pairs in length; and (viii) the dsRNA has a blunt end at 5′-end of the antisense strand.

[0451] In some embodiments, the sense strand comprises phosphorothioate internucleotide linkages between nucleotide positions 1 and 2, and between nucleotide positions 2 and 3, the antisense strand comprises phosphorothioate internucleotide linkages between nucleotide positions 1 and 2, between nucleotide positions 2 and 3, between nucleotide positions 21 and 22, and between nucleotide positions 22 and 23, wherein the antisense strand contains at least one thermally destabilizing modification of the duplex located in the seed region of the antisense strand (i.e., at position 2-9 of the 5′-end of the antisense strand), and wherein the dsRNA optionally further has at least one (e.g., one, two, three, four, five, six or all seven) of the following characteristics: (i) the antisense comprises 2, 3, 4, 5 or 6 2′-fluoro modifications; (ii) the sense strand is conjugated with a ligand; (iii) the sense strand comprises 2, 3, 4 or 5 2′-fluoro modifications; (iv) the sense strand comprises 3, 4 or 5 phosphorothioate internucleotide linkages; (v) the dsRNA comprises at least four 2′-fluoro modifications; (vi) the dsRNA comprises a duplex region of 12-40 nucleotide pairs in length; and (vii) the dsRNA has a blunt end at 5′-end of the antisense strand.

[0452] In some embodiments, the dsRNA molecule of the disclosure comprises mismatch(es) with the target, within the duplex, or combinations thereof. The mismatch can occur in the overhang region or the duplex region. The base pair can be ranked on the basis of their propensity to promote dissociation or melting (e.g., on the free energy of association or dissociation of a particular pairing, the simplest approach is to examine the pairs on an individual pair basis, though next neighbor or similar analysis can also be used). In terms of promoting dissociation: A:U is preferred over G:C; G:U is preferred over G:C; and I:C is preferred over G:C (I=inosine). Mismatches, e.g., non-canonical or other than canonical pairings (as described elsewhere herein) are preferred over canonical (A:T, A:U, G:C) pairings; and pairings which include a universal base are preferred over canonical pairings.

[0453] In some embodiments, the dsRNA molecule of the disclosure comprises at least one of the first 1, 2, 3, 4, or 5 base pairs within the duplex regions from the 5′-end of the antisense strand can be chosen independently from the group of: A:U, G:U, I:C, and mismatched pairs, e.g., non-canonical or other than canonical pairings or pairings which include a universal base, to promote the dissociation of the antisense strand at the 5′-end of the duplex.

[0454] In some embodiments, the nucleotide at the 1 position within the duplex region from the 5′-end in the antisense strand is selected from the group consisting of A, dA, dU, U, and dT. Alternatively, at least one of the first 1, 2 or 3 base pair within the duplex region from the 5′-end of the antisense strand is an AU base pair. For example, the first base pair within the duplex region from the 5′-end of the antisense strand is an AU base pair.

[0455] It was found that introducing 4′-modified or 5′-modified nucleotide to the 3′-end of a phosphodiester (PO), phosphorothioate (PS), or phosphorodithioate (PS2) linkage of a dinucleotide at any position of single stranded or double stranded oligonucleotide can exert steric effect to the internucleotide linkage and, hence, protecting or stabilizing it against nucleases.

[0456] In some embodiments, 5′-modified nucleotide is introduced at the 3′-end of a dinucleotide at any position of single stranded or double stranded siRNA. For instance, a 5′-alkylated nucleotide may be introduced at the 3′-end of a dinucleotide at any position of single stranded or double stranded siRNA. The alkyl group at the 5′ position of the ribose sugar can be racemic or chirally pure Ror S isomer. An exemplary 5′-alkylated nucleotide is 5′-methyl nucleoside. The 5′-methyl can be either racemic or chirally pure R or S isomer.

[0457] In some embodiments, 4′-modified nucleotide is introduced at the 3′-end of a dinucleotide at any position of single stranded or double stranded siRNA. For instance, a 4′-alkylated nucleotide may be introduced at the 3′-end of a dinucleotide at any position of single stranded or double stranded siRNA. The alkyl group at the 4′ position of the ribose sugar can be racemic or chirally pure R or S isomer. An exemplary 4′-alkylated nucleotide is 4′-methyl nucleotide. The 4′-methyl can be either racemic or chirally pure R or S isomer. Alternatively, a 4′-O-alkylated nucleotide may be introduced at the 3′-end of a dinucleotide at any position of single stranded or double stranded siRNA. The 4′-O-alkyl of the ribose sugar can be racemic or chirally pure R or S isomer. An exemplary 4′-O-alkylated nucleotide is 4′-O-methyl nucleotide. The 4′-O-methyl can be either racemic or chirally pure R or S isomer.

[0458] In some embodiments, 5′-alkylated nucleotide is introduced at any position on the sense strand or antisense strand of a dsRNA, and such modification maintains or improves potency of the dsRNA. The 5′-alkyl can be either racemic or chirally pure R or S isomer. An exemplary 5′-alkylated nucleotide is 5′-methyl nucleotide. The 5′-methyl can be either racemic or chirally pure R or S isomer.

[0459] In some embodiments, 4′-alkylated nucleotide is introduced at any position on the sense strand or antisense strand of a dsRNA, and such modification maintains or improves potency of the dsRNA. The 4′-alkyl can be either racemic or chirally pure R or S isomer. An exemplary 4′-alkylated nucleotide is 4′-methyl nucleotide. The 4′-methyl can be either racemic or chirally pure R or S isomer.

[0460] In some embodiments, 4′-O-alkylated nucleotide is introduced at any position on the sense strand or antisense strand of a dsRNA, and such modification maintains or improves potency of the dsRNA. The 5′-alkyl can be either racemic or chirally pure R or S isomer. An exemplary 4′-O-alkylated nucleotide is 4′-O-methyl nucleotide. The 4′-O-methyl can be either racemic or chirally pure R or S isomer.

[0461] In some embodiments, the dsRNA molecule of the disclosure can comprise 2′-5′ linkages (with 2′-H, 2′-OH and 2′-OMe and with P═O or P═S). For example, the 2′-5′ linkages modifications can be used to promote nuclease resistance or to inhibit binding of the sense to the antisense strand, or can be used at the 5′ end of the sense strand to avoid sense strand activation by RISC.

[0462] In another embodiment, the dsRNA molecule of the disclosure can comprise L sugars (e.g., L ribose, L-arabinose with 2′-H, 2′-OH and 2′-OMe). For example, these L sugars modifications can be used to promote nuclease resistance or to inhibit binding of the sense to the antisense strand, or can be used at the 5′ end of the sense strand to avoid sense strand activation by RISC.

[0463] Various publications describe multimeric siRNA which can all be used with the dsRNA of the disclosure. Such publications include WO2007/091269, U.S. Pat. No. 7,858,769, WO2010/141511, WO2007/117686, WO2009/014887, and WO2011/031520 which are hereby incorporated by their entirely.

[0464] As described in more detail below, the RNAi agent that contains conjugations of one or more carbohydrate moieties to an RNAi agent can optimize one or more properties of the RNAi agent. In many cases, the carbohydrate moiety will be attached to a modified subunit of the RNAi agent. For example, the ribose sugar of one or more ribonucleotide subunits of a dsRNA agent can be replaced with another moiety, e.g., a non-carbohydrate (such as, cyclic) carrier to which is attached a carbohydrate ligand. A ribonucleotide subunit in which the ribose sugar of the subunit has been so replaced is referred to herein as a ribose replacement modification subunit (RRMS). A cyclic carrier may be a carbocyclic ring system, i.e., all ring atoms are carbon atoms, or a heterocyclic ring system, i.e., one or more ring atoms may be a heteroatom, e.g., nitrogen, oxygen, sulfur. The cyclic carrier may be a monocyclic ring system, or may contain two or more rings, e.g. fused rings. The cyclic carrier may be a fully saturated ring system, or it may contain one or more double bonds.

[0465] The ligand may be attached to the polynucleotide via a carrier. The carriers include (i) at least one “backbone attachment point.” such as two “backbone attachment points” and (ii) at least one “tethering attachment point.” A “backbone attachment point” as used herein refers to a functional group, e.g. a hydroxyl group, or generally, a bond available for, and that is suitable for incorporation of the carrier into the backbone, e.g., the phosphate, or modified phosphate, e.g., sulfur containing. backbone, of a ribonucleic acid. A “tethering attachment point” (TAP) in some embodiments refers to a constituent ring atom of the cyclic carrier, e.g., a carbon atom or a heteroatom (distinct from an atom which provides a backbone attachment point), that connects a selected moiety. The moiety can be. e.g., a carbohydrate, e.g. monosaccharide, disaccharide, trisaccharide, tetrasaccharide, oligosaccharide and polysaccharide. Optionally, the selected moiety is connected by an intervening tether to the cyclic carrier. Thus, the cyclic carrier will often include a functional group, e.g., an amino group, or generally, provide a bond, that is suitable for incorporation or tethering of another chemical entity, e.g., a ligand to the constituent ring.

[0466] The RNAi agents may be conjugated to a ligand via a carrier, wherein the carrier can be cyclic group or acyclic group. In one embodiment, the cyclic group is selected from pyrrolidinyl, pyrazolinyl, pyrazolidinyl, imidazolinyl, imidazolidinyl, piperidinyl, piperazinyl, [1,3]dioxolane, oxazolidinyl, isoxazolidinyl, morpholinyl, thiazolidinyl, isothiazolidinyl, quinoxalinyl, pyridazinonyl, tetrahydrofuryl and and decalin. In another embodiment, the acyclic group is selected from serinol backbone or dicthanolamine backbone.

[0467] In certain specific embodiments, the RNAi agent for use in the methods of the disclosure is an agent selected from the group of agents listed in any one of Tables 2-3. These agents may further comprise a ligand, such as one or more lipophilic moieties, one or more GalNAc derivatives, or both of one of more lipophilic moieties and one or more GalNAc derivatives.

### IV. iRNAs Conjugated to Ligands

[0468] Another modification of the RNA of an iRNA of the invention involves chemically linking to the iRNA one or more ligands, moieties or conjugates that enhance the activity, cellular distribution or cellular uptake of the iRNA into a cell. Such moieties include but are not limited to lipid moieties such as a cholesterol moiety (Letsinger et al., Proc. Natl. Acid. Sci. USA, 1989, 86: 6553-6556), cholic acid (Manoharan et al., Biorg. Med. Chem. Let., 1994, 4:1053-1060), a thioether, e.g., beryl-S-tritylthiol (Manoharan et al., Ann. N.Y. Acad. Sci., 1992, 660:306-309; Manoharan et al., Biorg. Med. Chem. Let., 1993, 3:2765-2770), a thiocholesterol (Oberhauser et al., Nucl. Acids Res., 1992, 20:533-538), an aliphatic chain, e.g., dodecandiol or undecyl residues (Saison-Behmoaras et al., EMBO J. 1991, 10:1111-1118; Kabanov et al., FEBS Lett., 1990, 259:327-330; Svinarchuk et al., Biochimie, 1993, 75:49-54), a phospholipid, e.g., di-hexadecyl-rac-glycerol or triethyl-ammonium 1,2-di-O-hexadecyl-rac-glycero-3-phosphonate (Manoharan et al., Tetrahedron Lett., 1995, 36:3651-3654; Shea et al., Nucl. Acids Res., 1990, 18:3777-3783), a polyamine or a polyethylene glycol chain (Manoharan et al., Nucleosides & Nucleotides, 1995, 14:969-973), or adamantane acetic acid (Manoharan et al., Tetrahedron Lett., 1995, 36:3651-3654), a palmityl moicty (Mishra et al., Biochim. Biophys. Acta, 1995, 1264:229-237), or an octadecylamine or hexylamino-carbonyloxycholesterol moiety (Crooke et al., J. Pharmacol. Exp. Ther., 1996, 277:923-937).

[0469] In certain embodiments, a ligand alters the distribution, targeting or lifetime of an iRNA agent into which it is incorporated. In some embodiments, a ligand provides an enhanced affinity for a selected target, e.g., molecule, cell or cell type, compartment, e.g., a cellular or organ compartment, tissue, organ or region of the body, as, e.g., compared to a species absent such a ligand. Typical ligands will not take part in duplex pairing in a duplexed nucleic acid.

[0470] Ligands can include a naturally occurring substance, such as a protein (e.g., human serum albumin (HSA), low-density lipoprotein (LDL), or globulin); carbohydrate (e.g., a dextran, pullulan, chitin, chitosan, inulin, cyclodextrin or hyaluronic acid); or a lipid. The ligand may also be a recombinant or synthetic molecule, such as a synthetic polymer, e.g., a synthetic polyamino acid. Examples of polyamino acids include polyamino acid is a polylysine (PLL), poly L-aspartic acid, poly L-glutamic acid, styrene-maleic acid anhydride copolymer, poly(L-lactide-co-glycolied) copolymer, divinyl ether-maleic anhydride copolymer, N-(2-hydroxypropyl)methacrylamide copolymer (HMPA), polyethylene glycol (PEG), polyvinyl alcohol (PVA), polyurethane, poly(2-ethylacryllic acid), N-isopropylacrylamide polymers, or polyphosphazine. Example of polyamines include: polyethylenimine, polylysine (PLL), spermine, spermidine, polyamine, pseudopeptide-polyamine, peptidomimetic polyamine, dendrimer polyamine, arginine, amidine, protamine, cationic lipid, cationic porphyrin, quaternary salt of a polyamine, or an a helical peptide.

[0471] Ligands can also include targeting groups, e.g., a cell or tissue targeting agent, e.g., a lectin, glycoprotein, lipid or protein, e.g., an antibody, that binds to a specified cell type such as a kidney cell. A targeting group can be a thyrotropin, melanotropin, lectin, glycoprotein, surfactant protein A, Mucin carbohydrate, multivalent lactose, multivalent galactose, N-acetyl-galactosamine, N-acetyl-glucosamine multivalent mannose, multivalent fucose, glycosylated polyaminoacids, multivalent galactose, transferrin, bisphosphonate, polyglutamate, polyaspartate, a lipid, cholesterol, a steroid, bile acid, folate, vitamin B12, biotin, or an RGD peptide or RGD peptide mimetic. In certain embodiments, the ligand is a multivalent galactose, e.g., an N-acetyl-galactosamine.

[0472] Other examples of ligands include dyes, intercalating agents (e.g. acridines), cross-linkers (e.g. psoralene, mitomycin C), porphyrins (TPPC4, texaphyrin, Sapphyrin), polycyclic aromatic hydrocarbons (e.g., phenazine, dihydrophenazine), artificial endonucleases (e.g. EDTA), lipophilic molecules, e.g., cholesterol, cholic acid, adamantane acetic acid, 1-pyrene butyric acid, dihydrotestosterone, 1,3-Bis-O(hexadecyl)glycerol, geranyloxyhexyl group, hexadecylglycerol, borneol, menthol, 1,3-propanediol, heptadecyl group, palmitic acid, myristic acid, O3-(oleoyl)lithocholic acid, O3-(oleoyl)cholenic acid, dimethoxytrityl, or phenoxazine)and peptide conjugates (e.g., antennapedia peptide, Tat peptide), alkylating agents, phosphate, amino, mercapto, PEG (e.g., PEG-40K), MPEG, [MPEG]2, polyamino, alkyl, substituted alkyl, radiolabeled markers, enzymes, haptens (e.g. biotin), transport/absorption facilitators (e.g., aspirin, vitamin E, folic acid), synthetic ribonucleases (e.g., imidazole, bisimidazole, histamine, imidazole clusters, acridine-imidazole conjugates, Eu3+ complexes of tetraazamacrocycles), dinitrophenyl, HRP, or AP.

[0473] Ligands can be proteins, e.g., glycoproteins, or peptides, e.g., molecules having a specific affinity for a co-ligand, or antibodies e.g., an antibody, that binds to a specified cell type such as a cancer cell, endothelial cell, or bone cell. Ligands may also include hormones and hormone receptors. They can also include non-peptidic species, such as lipids, lectins, carbohydrates, vitamins, cofactors, multivalent lactose, multivalent galactose, N-acetyl-galactosamine, N-acetyl-glucosamine multivalent mannose, or multivalent fucose. The ligand can be, for example, a lipopolysaccharide, an activator of p38 MAP kinase, or an activator of NF-κB.

[0474] The ligand can be a substance, e.g., a drug, which can increase the uptake of the iRNA agent into the cell, for example, by disrupting the cell's cytoskeleton, e.g., by disrupting the cell's microtubules, microfilaments, or intermediate filaments. The drug can be, for example, taxon, vincristine, vinblastine, cytochalasin, nocodazole, japlakinolide, latrunculin A, phalloidin, swinholide A, indanocine, or myoservin.

[0475] In some embodiments, a ligand attached to an iRNA as described herein acts as a pharmacokinetic modulator (PK modulator). PK modulators include lipophiles, bile acids, steroids, phospholipid analogues, peptides, protein binding agents, PEG, vitamins etc. Exemplary PK modulators include, but are not limited to, cholesterol, fatty acids, cholic acid, lithocholic acid, dialkylglycerides, diacylglyceride, phospholipids, sphingolipids, naproxen, ibuprofen, vitamin E, biotin etc. Oligonucleotides that comprise a number of phosphorothioate linkages are also known to bind to serum protein, thus short oligonucleotides, e.g., oligonucleotides of about 5 bases, 10 bases, 15 bases or 20 bases, comprising multiple of phosphorothioate linkages in the backbone are also amenable to the present invention as ligands (e.g. as PK modulating ligands). In addition, aptamers that bind serum components (e.g. serum proteins) are also suitable for use as PK modulating ligands in the embodiments described herein.

[0476] Ligand-conjugated iRNAs of the invention may be synthesized by the use of an oligonucleotide that bears a pendant reactive functionality, such as that derived from the attachment of a linking molecule onto the oligonucleotide (described below). This reactive oligonucleotide may be reacted directly with commercially-available ligands, ligands that are synthesized bearing any of a variety of protecting groups, or ligands that have a linking moiety attached thereto.

[0477] The oligonucleotides used in the conjugates of the present invention may be conveniently and routinely made through the well-known technique of solid-phase synthesis. Equipment for such synthesis is sold by several vendors including, for example, Applied Biosystems® (Foster City, Calif.). Any other means for such synthesis known in the art may additionally or alternatively be employed. It is also known to use similar techniques to prepare other oligonucleotides, such as the phosphorothioates and alkylated derivatives.

[0478] In the ligand-conjugated oligonucleotides and ligand-molecule bearing sequence-specific linked nucleosides of the present invention, the oligonucleotides and oligonucleosides may be assembled on a suitable DNA synthesizer utilizing standard nucleotide or nucleoside precursors, or nucleotide or nucleoside conjugate precursors that already bear the linking moiety, ligand-nucleotide or nucleoside-conjugate precursors that already bear the ligand molecule, or non-nucleoside ligand-bearing building blocks.

[0479] When using nucleotide-conjugate precursors that already bear a linking moiety, the synthesis of the sequence-specific linked nucleosides is typically completed, and the ligand molecule is then reacted with the linking moiety to form the ligand-conjugated oligonucleotide. In some embodiments, the oligonucleotides or linked nucleosides of the present invention are synthesized by an automated synthesizer using phosphoramidites derived from ligand-nucleoside conjugates in addition to the standard phosphoramidites and non-standard phosphoramidites that are commercially available and routinely used in oligonucleotide synthesis.

### A. Lipid Conjugates

[0480] In certain embodiments, the ligand or conjugate is a lipid or lipid-based molecule. Such a lipid or lipid-based molecule can typically bind a serum protein, such as human serum albumin (HSA). An HSA binding ligand allows for distribution of the conjugate to a target tissue, e.g., a non-kidney target tissue of the body. For example, the target tissue can be the liver, including parenchymal cells of the liver. Other molecules that can bind HSA can also be used as ligands. For example, naproxen or aspirin can be used. A lipid or lipid-based ligand can (a) increase resistance to degradation of the conjugate, (b) increase targeting or transport into a target cell or cell membrane, or (c) can be used to adjust binding to a serum protein, e.g., HSA.

[0481] A lipid-based ligand can be used to modulate, e.g., control (e.g., inhibit) the binding of the conjugate to a target tissue. For example, a lipid or lipid-based ligand that binds to HSA more strongly will be less likely to be targeted to the kidney and therefore less likely to be cleared from the body. A lipid or lipid-based ligand that binds to HSA less strongly can be used to target the conjugate to the kidney.

[0482] In certain embodiments, the lipid-based ligand binds HSA. For example, the ligand can bind HSA with a sufficient affinity such that distribution of the conjugate to a non-kidney tissue is enhanced. However, the affinity is typically not so strong that the HSA-ligand binding cannot be reversed.

[0483] In certain embodiments, the lipid-based ligand binds HSA weakly or not at all, such that distribution of the conjugate to the kidney is enhanced. Other moieties that target to kidney cells can also be used in place of or in addition to the lipid-based ligand.

[0484] In another aspect, the ligand is a moiety, e.g., a vitamin, which is taken up by a target cell, e.g., a proliferating cell. These are particularly useful for treating disorders characterized by unwanted cell proliferation, e.g., of the malignant or non-malignant type, e.g., cancer cells. Exemplary vitamins include vitamin A, E, and K. Other exemplary vitamins include are B vitamin, e.g., folic acid, B12, riboflavin, biotin, pyridoxal or other vitamins or nutrients taken up by cancer cells. Also included are HSA and low density lipoprotein (LDL).

### B. Cell Permeation Agents

[0485] In another aspect, the ligand is a cell-permeation agent, such as a helical cell-permeation agent. In certain embodiments, the agent is amphipathic. An exemplary agent is a peptide such as tat or antennopedia. If the agent is a peptide, it can be modified, including a peptidylmimetic, invertomers, non-peptide or pseudo-peptide linkages, and use of D-amino acids. The helical agent is typically an α-helical agent and can have a lipophilic and a lipophobic phase.

[0486] The ligand can be a peptide or peptidomimetic. A peptidomimetic (also referred to herein as an oligopeptidomimetic) is a molecule capable of folding into a defined three-dimensional structure similar to a natural peptide. The attachment of peptide and peptidomimetics to iRNA agents can affect pharmacokinetic distribution of the iRNA, such as by enhancing cellular recognition and absorption. The peptide or peptidomimetic moiety can be about 5-50 amino acids long, e.g., about 5, 10, 15, 20, 25, 30, 35, 40, 45, or 50 amino acids long.

[0487] A peptide or peptidomimetic can be, for example, a cell permeation peptide, cationic peptide, amphipathic peptide, or hydrophobic peptide (e.g., consisting primarily of Tyr, Trp, or Phe). The peptide moiety can be a dendrimer peptide, constrained peptide or crosslinked peptide. In another alternative, the peptide moiety can include a hydrophobic membrane translocation sequence (MTS). An exemplary hydrophobic MTS-containing peptide is RFGF having the amino acid sequence AAVALLPAVLLALLAP (SEQ ID NO:11). An RFGF analogue (e.g., amino acid sequence AALLPVLLAAP (SEQ ID NO: 12)) containing a hydrophobic MTS can also be a targeting moiety. The peptide moiety can be a “delivery” peptide, which can carry large polar molecules including peptides, oligonucleotides, and protein across cell membranes. For example, sequences from the HIV Tat protein (GRKKRRQRRRPPQ (SEQ ID NO:13)) and the Drosophila antennapedia protein (RQIKIWFQNRRMKWKK (SEQ ID NO:14)) have been found to be capable of functioning as delivery peptides. A peptide or peptidomimetic can be encoded by a random sequence of DNA, such as a peptide identified from a phage-display library, or one-bead-one-compound (OBOC) combinatorial library (Lam et al., Nature, 354:82-84, 1991). Typically, the peptide or peptidomimetic tethered to a dsRNA agent via an incorporated monomer unit is a cell targeting peptide such as an arginine-glycine-aspartic acid (RGD)-peptide, or RGD mimic. A peptide moiety can range in length from about 5 amino acids to about 40 amino acids. The peptide moieties can have a structural modification, such as to increase stability or direct conformational properties. Any of the structural modifications described below can be utilized.

[0488] An RGD peptide for use in the compositions and methods of the invention may be linear or cyclic, and may be modified, e.g., glycosylated or methylated, to facilitate targeting to a specific tissue(s). RGD-containing peptides and peptidiomimemtics may include D-amino acids, as well as synthetic RGD mimics. In addition to RGD, one can use other moieties that target the integrin ligand, such as PECAM-1 or VEGF.

[0489] An RGD peptide moiety can be used to target a particular cell type, e.g., a tumor cell, such as an endothelial tumor cell or a breast cancer tumor cell (Zitzmann et al., Cancer Res., 62:5139-43, 2002). An RGD peptide can facilitate targeting of an dsRNA agent to tumors of a variety of other tissues, including the lung, kidney, spleen, or liver (Aoki et al., Cancer Gene Therapy 8:783-787, 2001). Typically, the RGD peptide will facilitate targeting of an iRNA agent to the kidney. The RGD peptide can be linear or cyclic, and can be modified, e.g., glycosylated or methylated to facilitate targeting to specific tissues. For example, a glycosylated RGD peptide can deliver an iRNA agent to a tumor cell expressing α_{V}β₃ (Haubner et al., Jour. Nucl. Med., 42:326-336, 2001).

[0490] A “cell permeation peptide” is capable of permeating a cell, e.g., a microbial cell, such as a bacterial or fungal cell, or a mammalian cell, such as a human cell. A microbial cell-permeating peptide can be, for example, an α-helical linear peptide (e.g., LL-37 or Ceropin P1), a disulfide bond-containing peptide (e.g., α-defensin, β-defensin or bactenecin), or a peptide containing only one or two dominating amino acids (e.g., PR-39 or indolicidin). A cell permeation peptide can also include a nuclear localization signal (NLS). For example, a cell permeation peptide can be a bipartite amphipathic peptide, such as MPG, which is derived from the fusion peptide domain of HIV-1 gp41 and the NLS of SV40 large T antigen (Simeoni et al., Nucl. Acids Res. 31:2717-2724, 2003).

### C. Carbohydrate Conjugates

[0491] In some embodiments of the compositions and methods of the invention, an iRNA further comprises a carbohydrate. The carbohydrate conjugated iRNA are advantageous for the in vivo delivery of nucleic acids, as well as compositions suitable for in vivo therapeutic use, as described herein. As used herein, “carbohydrate” refers to a compound which is either a carbohydrate per se made up of one or more monosaccharide units having at least 6 carbon atoms (which can be linear, branched or cyclic) with an oxygen, nitrogen or sulfur atom bonded to each carbon atom; or a compound having as a part thereof a carbohydrate moiety made up of one or more monosaccharide units each having at least six carbon atoms (which can be linear, branched or cyclic), with an oxygen, nitrogen or sulfur atom bonded to each carbon atom. Representative carbohydrates include the sugars (mono-, di-, tri- and oligosaccharides containing from about 4, 5, 6, 7, 8, or 9 monosaccharide units), and polysaccharides such as starches, glycogen, cellulose and polysaccharide gums. Specific monosaccharides include C5 and above (e.g., C5, C6, C7, or C8) sugars; di- and tri-saccharides include sugars having two or three monosaccharide units (e.g., C5, C6, C7, or C8).

[0492] In certain embodiments, a carbohydrate conjugate comprises a monosaccharide.

[0493] In certain embodiments, the monosaccharide is an N-acetylgalactosamine (GalNAc). GalNAc conjugates, which comprise one or more N-acetylgalactosamine (GalNAc) derivatives, are described, for example, in U.S. Pat. No. 8,106,022, the entire content of which is hereby incorporated herein by reference. In some embodiments, the GalNAc conjugate serves as a ligand that targets the iRNA to particular cells. In some embodiments, the GalNAc conjugate targets the iRNA to liver cells, e.g., by serving as a ligand for the asialoglycoprotein receptor of liver cells (e.g., hepatocytes).

[0494] In some embodiments, the carbohydrate conjugate comprises one or more GalNAc derivatives. The GalNAc derivatives may be attached via a linker, e.g., a bivalent or trivalent branched linker. In some embodiments the GalNAc conjugate is conjugated to the 3′ end of the sense strand. In some embodiments, the GalNAc conjugate is conjugated to the iRNA agent (e.g., to the 3′ end of the sense strand) via a linker, e.g., a linker as described herein. In some embodiments the GalNAc conjugate is conjugated to the 5′ end of the sense strand. In some embodiments, the GalNAc conjugate is conjugated to the iRNA agent (e.g., to the 5′ end of the sense strand) via a linker, e.g., a linker as described herein.

[0495] In certain embodiments of the invention, the GalNAc or GalNAc derivative is attached to an iRNA agent of the invention via a monovalent linker. In some embodiments, the GalNAc or GalNAc derivative is attached to an iRNA agent of the invention via a bivalent linker. In yet other embodiments of the invention, the GalNAc or GalNAc derivative is attached to an iRNA agent of the invention via a trivalent linker. In other embodiments of the invention, the GalNAc or GalNAc derivative is attached to an iRNA agent of the invention via a tetravalent linker.

[0496] In certain embodiments, the double stranded RNAi agents of the invention comprise one GalNAc or GalNAc derivative attached to the iRNA agent. In certain embodiments, the double stranded RNAi agents of the invention comprise a plurality (e.g., 2, 3, 4, 5, or 6) GalNAc or GalNAc derivatives, each independently attached to a plurality of nucleotides of the double stranded RNAi agent through a plurality of monovalent linkers.

[0497] In some embodiments, for example, when the two strands of an iRNA agent of the invention are part of one larger molecule connected by an uninterrupted chain of nucleotides between the 3′-end of one strand and the 5′-end of the respective other strand forming a hairpin loop comprising, a plurality of unpaired nucleotides, each unpaired nucleotide within the hairpin loop may independently comprise a GalNAc or GalNAc derivative attached via a monovalent linker. The hairpin loop may also be formed by an extended overhang in one strand of the duplex.

[0498] In some embodiments, for example, when the two strands of an iRNA agent of the invention are part of one larger molecule connected by an uninterrupted chain of nucleotides between the 3′-end of one strand and the 5′-end of the respective other strand forming a hairpin loop comprising, a plurality of unpaired nucleotides, each unpaired nucleotide within the hairpin loop may independently comprise a GalNAc or GalNAc derivative attached via a monovalent linker. The hairpin loop may also be formed by an extended overhang in one strand of the duplex.

[0499] In some embodiments, the GalNAc conjugate is

[chemical structure]

[0500] In some embodiments, the RNAi agent is attached to the carbohydrate conjugate via a linker as shown in the following schematic, wherein X is O or S

[chemical structure]

[0501] In some embodiments, the RNAi agent is conjugated to L96 as defined in Table 1 and shown below:

[chemical structure]

[0502] In certain embodiments, a carbohydrate conjugate for use in the compositions and methods of the invention is selected from the group consisting of:

[chemical structure]

[chemical structure]

[chemical structure]

[chemical structure]

[chemical structure]

[chemical structure]

[chemical structure]

[0503] In certain embodiments, a carbohydrate conjugate for use in the compositions and methods of the invention is a monosaccharide. In certain embodiments, the monosaccharide is an N-acetylgalactosamine, such as

[chemical structure]

[0504] Another representative carbohydrate conjugate for use in the embodiments described herein includes, but is not limited to,

[chemical structure]

[0505] when one of X or Y is an oligonucleotide, the other is a hydrogen.

[0506] In some embodiments, a suitable ligand is a ligand disclosed in WO 2019/055633, the entire contents of which are incorporated herein by reference. In one embodiment the ligand comprises the structure below:

[chemical structure]

[0507] In certain embodiments, the RNAi agents of the disclosure may include GalNAc ligands.

[0508] In certain embodiments of the invention, the GalNAc or GalNAc derivative is attached to an iRNA agent of the invention via a monovalent linker. In some embodiments, the GalNAc or GalNAc derivative is attached to an iRNA agent of the invention via a bivalent linker. In yet other embodiments of the invention, the GalNAc or GalNAc derivative is attached to an iRNA agent of the invention via a trivalent linker. In other embodiments of the invention, the GalNAc or GalNAc derivative is attached to an iRNA agent of the invention via a tetravalent linker.

[0509] In certain embodiments, the double stranded RNAi agents of the invention comprise one GalNAc or GalNAc derivative attached to the iRNA agent, e.g., the 5′end of the sense strand of a dsRNA agent, or the 5′ end of one or both sense strands of a dual targeting RNAi agent as described herein. In certain embodiments, the double stranded RNAi agents of the invention comprise a plurality (e.g., 2, 3, 4, 5, or 6) GalNAc or GalNAc derivatives, each independently attached to a plurality of nucleotides of the double stranded RNAi agent through a plurality of monovalent linkers.

[0510] In some embodiments, for example, when the two strands of an iRNA agent of the invention are part of one larger molecule connected by an uninterrupted chain of nucleotides between the 3′-end of one strand and the 5′-end of the respective other strand forming a hairpin loop comprising, a plurality of unpaired nucleotides, each unpaired nucleotide within the hairpin loop may independently comprise a GalNAc or GalNAc derivative attached via a monovalent linker.

[0511] In some embodiments, the carbohydrate conjugate further comprises one or more additional ligands as described above, such as, but not limited to, a PK modulator or a cell permeation peptide.

[0512] Additional carbohydrate conjugates and linkers suitable for use in the present invention include those described in WO 2014/179620 and WO 2014/179627, the entire contents of each of which are incorporated herein by reference.

### D. Linkers

[0513] In some embodiments, the conjugate or ligand described herein can be attached to an iRNA oligonucleotide with various linkers that can be cleavable or non-cleavable.

[0514] The term “linker” or “linking group” means an organic moiety that connects two parts of a compound, e.g., covalently attaches two parts of a compound. Linkers typically comprise a direct bond or an atom such as oxygen or sulfur, a unit such as NR8, C(O), C(O)NH, SO, SO₂, SO₂NH or a chain of atoms, such as, but not limited to, substituted or unsubstituted alkyl, substituted or unsubstituted alkenyl, substituted or unsubstituted alkynyl, arylalkyl, arylalkenyl, arylalkynyl, heteroarylalkyl, heteroarylalkenyl, heteroarylalkynyl, heterocyclylalkyl, heterocyclylalkenyl, heterocyclylalkynyl, aryl, heteroaryl, heterocyclyl, cycloalkyl, cycloalkenyl, alkylarylalkyl, alkylarylalkenyl, alkylarylalkynyl, alkenylarylalkyl, alkenylarylalkenyl, alkenylarylalkynyl. alkynylarylalkyl, alkynylarylalkenyl, alkynylarylalkynyl, alkylheteroarylalkyl, alkylheteroarylalkenyl, alkylheteroarylalkynyl, alkenylheteroarylalkyl, alkenylheteroarylalkenyl, alkenylheteroarylalkynyl, alkynylheteroarylalkyl, alkynylheteroarylalkenyl, alkynylheteroarylalkynyl, alkylheterocyclylalkyl, alkylheterocyclylalkenyl, alkylhererocyclylalkynyl, alkenylheterocyclylalkyl, alkenylheterocyclylalkenyl, alkenylheterocyclylalkynyl, alkynylheterocyclylalkyl, alkynylheterocyclylalkenyl, alkynylheterocyclylalkynyl, alkylaryl, alkenylaryl, alkynylaryl, alkylheteroaryl, alkenylheteroaryl, alkynylhereroaryl, which one or more methylenes can be interrupted or terminated by O, S, S(O), SO₂, N(R8), C(O), substituted or unsubstituted aryl, substituted or unsubstituted heteroaryl, substituted or unsubstituted heterocyclic; where R8 is hydrogen, acyl, aliphatic or substituted aliphatic. In certain embodiments, the linker is between about 1-24 atoms, 2-24, 3-24, 4-24, 5-24, 6-24, 6-18, 7-18, 8-18 atoms, 7-17, 8-17, 6-16, 7-16, or 8-16 atoms.

[0515] A cleavable linking group is one which is sufficiently stable outside the cell, but which upon entry into a target cell is cleaved to release the two parts the linker is holding together. In one embodiment, the cleavable linking group is cleaved at least about 10 times, 20, times, 30 times, 40 times, 50 times, 60 times, 70 times, 80 times, 90 times or more, or at least about 100 times faster in a target cell or under a first reference condition (which can, e.g., be selected to mimic or represent intracellular conditions) than in the blood of a subject, or under a second reference condition (which can, e.g., be selected to mimic or represent conditions found in the blood or serum).

[0516] Cleavable linking groups are susceptible to cleavage agents, e.g., pH, redox potential or the presence of degradative molecules. Generally, cleavage agents are more prevalent or found at higher levels or activities inside cells than in serum or blood. Examples of such degradative agents include: redox agents which are selected for particular substrates or which have no substrate specificity. including, e.g., oxidative or reductive enzymes or reductive agents such as mercaptans, present in cells, that can degrade a redox cleavable linking group by reduction; esterases; endosomes or agents that can create an acidic environment, e.g., those that result in a pH of five or lower; enzymes that can hydrolyze or degrade an acid cleavable linking group by acting as a general acid, peptidases (which can be substrate specific), and phosphatases.

[0517] A cleavable linkage group, such as a disulfide bond can be susceptible to pH. The pH of human serum is 7.4, while the average intracellular pH is slightly lower, ranging from about 7.1-7.3. Endosomes have a more acidic pH, in the range of 5.5-6.0, and lysosomes have an even more acidic pH at around 5.0. Some linkers will have a cleavable linking group that is cleaved at a selected pH. thereby releasing a cationic lipid from the ligand inside the cell, or into the desired compartment of the cell.

[0518] A linker can include a cleavable linking group that is cleavable by a particular enzyme. The type of cleavable linking group incorporated into a linker can depend on the cell to be targeted. For example, a liver-targeting ligand can be linked to a cationic lipid through a linker that includes an ester group. Liver cells are rich in esterases, and therefore the linker will be cleaved more efficiently in liver cells than in cell types that are not esterase-rich. Other cell-types rich in esterases include cells of the lung, renal cortex, and testis.

[0519] Linkers that contain peptide bonds can be used when targeting cell types rich in peptidases, such as liver cells and synoviocytes.

[0520] In general, the suitability of a candidate cleavable linking group can be evaluated by testing the ability of a degradative agent (or condition) to cleave the candidate linking group. It will also be desirable to also test the candidate cleavable linking group for the ability to resist cleavage in the blood or when in contact with other non-target tissue. Thus, one can determine the relative susceptibility to cleavage between a first and a second condition, where the first is selected to be indicative of cleavage in a target cell and the second is selected to be indicative of cleavage in other tissues or biological fluids, e.g., blood or serum. The evaluations can be carried out in cell free systems, in cells, in cell culture, in organ or tissue culture, or in whole animals. It can be useful to make initial evaluations in cell-free or culture conditions and to confirm by further evaluations in whole animals. In certain embodiments, useful candidate compounds are cleaved at least about 2, 4, 10, 20, 30, 40, 50, 60, 70, 80, 90, or about 100 times faster in the cell (or under in vitro conditions selected to mimic intracellular conditions) as compared to blood or serum (or under in vitro conditions selected to mimic extracellular conditions).

### i Redox Cleavable Linking Groups

[0521] In certain embodiments, a cleavable linking group is a redox cleavable linking group that is cleaved upon reduction or oxidation. An example of reductively cleavable linking group is a disulphide linking group (—S—S—). To determine if a candidate cleavable linking group is a suitable “reductively cleavable linking group.” or for example is suitable for use with a particular iRNA moiety and particular targeting agent one can look to methods described herein. For example, a candidate can be evaluated by incubation with dithiothreitol (DTT), or other reducing agent using reagents know in the art, which mimic the rate of cleavage which would be observed in a cell, e.g., a target cell. The candidates can also be evaluated under conditions which are selected to mimic blood or serum conditions. In one, candidate compounds are cleaved by at most about 10% in the blood. In other embodiments, useful candidate compounds are degraded at least about 2, 4, 10, 20, 30, 40, 50, 60, 70, 80, 90, or about 100 times faster in the cell (or under in vitro conditions selected to mimic intracellular conditions) as compared to blood (or under in vitro conditions selected to mimic extracellular conditions). The rate of cleavage of candidate compounds can be determined using standard enzyme kinetics assays under conditions chosen to mimic intracellular media and compared to conditions chosen to mimic extracellular media.

ii. Phosphate-Based Cleavable Linking Groups

[0522] In certain embodiments, a cleavable linker comprises a phosphate-based cleavable linking group. A phosphate-based cleavable linking group is cleaved by agents that degrade or hydrolyze the phosphate group. An example of an agent that cleaves phosphate groups in cells are enzymes such as phosphatases in cells. Examples of phosphate-based linking groups are —O—P(O)(ORk)-O—, —O—P(S)(ORk)—O—, —O—P(S)(SRk)-O—, —S—P(O)(ORk)-O—, —O—P(O)(ORk)-S—, —S—P(O)(ORk)-S—, —O—P(S)(ORk)-S—, —S—P(S)(ORk)-O—, —O—P(O)(Rk)-O—, —O—P(S)(Rk)-O—, —S—P(O)(Rk)-O—, —S—P(S)(Rk)-O—, —S—P(O)(Rk)-S—, —O—P(S)(Rk)-S, wherein Rk at each occurrence can be, independently, C1-C20 alkyl, C1-C20 haloalkyl, C6-C10 aryl, or C7-C12 aralkyl. Exmplary embodiments include —O—P(O)(OH)—O—, —O—P(S)(OH)—O—, —O—P(S)(SH)—O—, —S—P(O)(OH)—O—, —O—P(O)(OH)—S—, —S—P(O)(OH)—S—, —O—P(S)(OH)—S—, —S—P(S)(OH)—O—, —O—P(O)(H)—O—, —O—P(S)(H)—O—, —S—P(O)(H)—O, —S—P(S)(H)—O—, —S—P(O)(H)—S—, and —O—P(S)(H)—S—. in certain embodiments, a phosphate-based linking group is —O—P(O)(OH)—O—. These candidates can be evaluated using methods analogous to those described above.

iii. Acid Cleavable Linking Groups

[0523] In certain embodiments, a cleavable linker comprises an acid cleavable linking group. An acid cleavable linking group is a linking group that is cleaved under acidic conditions. In other embodiments acid cleavable linking groups are cleaved in an acidic environment with a pH of about 6.5 or lower (e.g., about 6.0, 5.75, 5.5, 5.25, 5.0, or lower), or by agents such as enzymes that can act as a general acid. In a cell, specific low pH organelles, such as endosomes and lysosomes can provide a cleaving environment for acid cleavable linking groups. Examples of acid cleavable linking groups include but are not limited to hydrazones, esters, and esters of amino acids. Acid cleavable groups can have the general formula —C═NN—, C(O)O, or —OC(O). An exemplary embodiment is when the carbon attached to the oxygen of the ester (the alkoxy group) is an aryl group, substituted alkyl group, or tertiary alkyl group such as dimethyl pentyl or t-butyl. These candidates can be evaluated using methods analogous to those described above.

iv. Ester-Based Cleavable Linking Groups

[0524] In certain embodiments, a cleavable linker comprises an ester-based cleavable linking group. An ester-based cleavable linking group is cleaved by enzymes such as esterases and amidases in cells. Examples of ester-based cleavable linking groups include but are not limited to esters of alkylene, alkenylene and alkynylene groups. Ester cleavable linking groups have the general formula —C(O)O—, or —OC(O)—. These candidates can be evaluated using methods analogous to those described above.

### V. Peptide-Based Cleavable Linking Groups

[0525] In yet another embodiment, a cleavable linker comprises a peptide-based cleavable linking group. A peptide-based cleavable linking group is cleaved by enzymes such as peptidases and proteases in cells. Peptide-based cleavable linking groups are peptide bonds formed between amino acids to yield oligopeptides (e.g., dipeptides, tripeptides etc.) and polypeptides. Peptide-based cleavable groups do not include the amide group (—C(O)NH—). The amide group can be formed between any alkylene, alkenylene or alkynelene. A peptide bond is a special type of amide bond formed between amino acids to yield peptides and proteins. The peptide based cleavage group is generally limited to the peptide bond (i.e., the amide bond) formed between amino acids yielding peptides and proteins and does not include the entire amide functional group. Peptide-based cleavable linking groups have the general formula —NHCHRAC(O)NHCHRBC(O)—, where RA and RB are the R groups of the two adjacent amino acids. These candidates can be evaluated using methods analogous to those described above.

[0526] In some embodiments, an iRNA of the invention is conjugated to a carbohydrate through a linker. Non-limiting examples of iRNA carbohydrate conjugates with linkers of the compositions and methods of the invention include, but are not limited to,

[chemical structure]

[chemical structure]

[chemical structure]

when one of X or Y is an oligonucleotide, the other is a hydrogen.

[0527] In certain embodiments of the compositions and methods of the invention, a ligand is one or more “GalNAc” (N-acetylgalactosamine) derivatives attached through a bivalent or trivalent branched linker.

[0528] In certain embodiments, a deRNA of the invention is conjugated to a bivalent or trivalent branched linker selected from the group of structures shown in any of formula (XLV)-(XLVI):

[chemical structure]

[0529] wherein:
[0530] q2A, q2B, q3A, q3B, q4A, q4B, q5A, q5B and q5C represent independently for each occurrence 0-20 and wherein the repeating unit can be the same or different;
[0531] P^{2A}, P^{2B}, P^{3A}, P^{3B}, P^{4A}, P^{4B}, P^{5A}, P^{5B}, P^{5C}, T^{2A}, T^{2B}, T^{3A}, T^{3B}, T^{4A}, T^{4B}, T^{4A}, T^{5B}, T^{5C} are each independently for each occurrence absent, CO, NH, O, S, OC(O), NHC(O), CH₂, CH₂NH or CH₂O;
[0532] Q^{2A}, Q^{2B}, Q^{3A}, Q^{3B}, Q^{4A}, Q^{4B}, Q^{5A}, Q^{5B}, Q^{5C} are independently for each occurrence absent, alkylene, substituted alkylene wherin one or more methylenes can be interrupted or terminated by one or more of O, S, S(O), SO₂, N(R^{N}), C(R′)═C(R″), C≡C or C(O);
[0533] R^{2A}, R^{2B}, R^{3A}, R^{3B}, R^{4A}, R^{4B}, R^{5A}, R^{5B}, R^{5C} are each independently for each occurrence absent, NH, O, S, CH₂, C(O)O, C(O)NH, NHCH(R^{a})C(O), —C(O)—CH(R^{a})—NH—, CO, CH═N—O,

[chemical structure]

or heterocyclyl;

[0534] L^{2A}, L^{2B}, L^{3A}, L^{3B}, L^{4A}, L^{4B}, L^{5A}, L^{5B}and L^{5C} represent the ligand; i.e. each independently for each occurrence a monosaccharide (such as GalNAc), disaccharide, trisaccharide, tetrasaccharide, oligosaccharide, or polysaccharide; and R^{a} is H or amino acid side chain. Trivalent conjugating GalNAc derivatives are particularly useful for use with RNAi agents for inhibiting the expression of a target gene, such as those of formula (XLIX):

[chemical structure]

[0535] wherein L^{5A}, L^{5B} and L^{5C} represent a monosaccharide, such as GalNAc derivative.

[0536] Examples of suitable bivalent and trivalent branched linker groups conjugating GalNAc derivatives include, but are not limited to, the structures recited above as formulas II, VII, XI, X, and XIII.

[0537] Representative U.S. patents that teach the preparation of RNA conjugates include, but are not limited to, U.S. Pat. Nos. 4,828,979; 4,948,882; 5,218,105; 5,525,465; 5,541,313; 5,545,730; 5,552,538; 5,578,717, 5,580,731; 5,591,584; 5,109,124; 5,118,802; 5,138,045; 5,414,077; 5,486,603; 5,512,439; 5,578,718; 5,608,046; 4,587,044; 4,605,735; 4,667,025; 4,762,779; 4,789,737; 4,824,941; 4,835,263; 4,876,335; 4,904,582; 4,958,013; 5,082,830; 5,112,963; 5,214,136; 5,082,830; 5,112,963; 5,214,136; 5,245,022; 5,254,469; 5,258,506; 5,262,536; 5,272,250; 5,292,873; 5,317,098; 5,371,241, 5,391,723; 5,416,203, 5,451,463; 5,510,475; 5,512,667; 5,514,785; 5,565,552; 5,567,810; 5,574,142; 5,585,481; 5,587,371; 5,595,726; 5,597,696; 5,599,923; 5,599,928;5,688,941; 6,294,664; 6,320,017; 6,576,752; 6,783,931; 6,900,297; 7,037,646; and 8,106,022, the entire contents of each of which are hereby incorporated herein by reference.

[0538] It is not necessary for all positions in a given compound to be uniformly modified, and in fact more than one of the aforementioned modifications can be incorporated in a single compound or even at a single nucleoside within an iRNA. The present invention also includes iRNA compounds that are chimeric compounds.

[0539] “Chimeric” iRNA compounds or “chimeras,” in the context of this invention, are iRNA compounds, such as dsRNA agents, that contain two or more chemically distinct regions, each made up of at least one monomer unit, i.e., a nucleotide in the case of a dsRNA compound. These iRNAs typically contain at least one region wherein the RNA is modified so as to confer upon the iRNA increased resistance to nuclease degradation, increased cellular uptake, or increased binding affinity for the target nucleic acid. An additional region of the iRNA can serve as a substrate for enzymes capable of cleaving RNA:DNA or RNA:RNA hybrids. By way of example, RNase H is a cellular endonuclease which cleaves the RNA strand of an RNA:DNA duplex. Activation of RNase H, therefore, results in cleavage of the RNA target, thereby greatly enhancing the efficiency of iRNA inhibition of gene expression. Consequently, comparable results can often be obtained with shorter iRNAs when chimeric dsRNAs are used, compared to phosphorothioate deoxy dsRNAs hybridizing to the same target region. Cleavage of the RNA target can be routinely detected by gel electrophoresis and, if necessary, associated nucleic acid hybridization techniques known in the art.

[0540] In certain instances, the RNA of an iRNA can be modified by a non-ligand group. A number of non-ligand molecules have been conjugated to iRNAs in order to enhance the activity, cellular distribution or cellular uptake of the iRNA, and procedures for performing such conjugations are available in the scientific literature. Such non-ligand moieties have included lipid moieties, such as cholesterol (Kubo, T. et al., Biochem. Biophys. Res. Comm., 2007, 365(1):54-61; Letsinger et al., Proc. Natl. Acad. Sci. USA, 1989, 86:6553), cholic acid (Manoharan et al., Bioorg. Med. Chem. Lett., 1994, 4:1053), a thioether, e.g., hexyl-S-tritylthiol (Manoharan et al., Ann. N.Y. Acad. Sci., 1992, 660:306; Manoharan et al., Bioorg. Med. Chem. Let., 1993, 3:2765), a thiocholesterol (Oberhauser et al., Nucl. Acids Res., 1992, 20:533), an aliphatic chain, e.g., dodecandiol or undecyl residues (Saison-Behmoaras et al., EMBO J., 1991, 10:111; Kabanov et al., FEBS Lett., 1990, 259:327; Svinarchuk et al., Biochimie, 1993, 75:49), a phospholipid, e.g., di-hexadecyl-rac-glycerol or triethylammonium 1,2-di-O-hexadecyl-rac-glycero-3-H-phosphonate (Manoharan et al., Tetrahedron Lett., 1995, 36:3651; Shea et al., Nucl. Acids Res., 1990, 18:3777), a polyamine or a polyethylene glycol chain (Manoharan et al., Nucleosides & Nucleotides, 1995, 14:969), or adamantane acetic acid (Manoharan et al., Tetrahedron Lett., 1995, 36:3651), a palmityl moiety (Mishra et al., Biochim. Biophys. Acta, 1995, 1264:229), or an octadecylamine or hexylamino-carbonyl-oxycholesterol moiety (Crooke et al., J. Pharmacol. Exp. Ther., 1996, 277:923). Representative United States patents that teach the preparation of such RNA conjugates have been listed above. Typical conjugation protocols involve the synthesis of RNAs bearing an aminolinker at one or more positions of the sequence. The amino group is then reacted with the molecule being conjugated using appropriate coupling or activating reagents. The conjugation reaction can be performed either with the RNA still bound to the solid support or following cleavage of the RNA, in solution phase. Purification of the RNA conjugate by HPLC typically affords the pure conjugate.

### V. Delivery of an RNAi Agent of the Disclosure

[0541] The delivery of a RNAi agent of the disclosure to a cell e.g., a cell within a subject, such as a human subject (e.g., a subject in need thereof, such as a subject having a SGLT2-associated disorder, e.g., gout or diabetes, e.g., a subject having or at risk of developing or at risk of having gout or diabetes, can be achieved in a number of different ways. For example, delivery may be performed by contacting a cell with an RNAi agent of the disclosure either in vitro or in vivo. In vivo delivery may also be performed directly by administering a composition comprising an RNAi agent, e.g., a dsRNA. to a subject. Alternatively, in vivo delivery may be performed indirectly by administering one or more vectors that encode and direct the expression of the RNAi agent. These alternatives are discussed further below.

[0542] In general, any method of delivering a nucleic acid molecule (in vitro or in vivo) can be adapted for use with a RNAi agent of the disclosure (see e.g., Akhtar S. and Julian RL., (1992) Trends Cell. Biol. 2(5): 139-144 and WO94/02595, which are incorporated herein by reference in their entireties). For in vivo delivery, factors to consider in order to deliver an RNAi agent include, for example, biological stability of the delivered agent, prevention of non-specific effects, and accumulation of the delivered agent in the target tissue. The non-specific effects of an RNAi agent can be minimized by local administration, for example, by direct injection or implantation into a tissue or topically administering the preparation. Local administration to a treatment site maximizes local concentration of the agent, limits the exposure of the agent to systemic tissues that can otherwise be harmed by the agent or that can degrade the agent, and permits a lower total dose of the RNAi agent to be administered. Several studies have shown successful knockdown of gene products when an RNAi agent is administered locally. For example, pulmonary delivery, e.g., inhalation, of a dsRNA, e.g., SOD1, has been shown to effectively knockdown gene and protein expression in lung tissue and that there is excellent uptake of the dsRNA by the bronchioles and alveoli of the lung. Intraocular delivery of a VEGF dsRNA by intravitreal injection in cynomolgus monkeys (Tolentino, MJ. et al., (2004) Retina 24:132-138) and subretinal injections in mice (Reich. SJ. et al. (2003) Mol. Vis. 9:210-216) were also both shown to prevent neovascularization in an experimental model of age-related macular degeneration. In addition, direct intratumoral injection of a dsRNA in mice reduces tumor volume (Pille. J. et al. (2005) Mol. Ther. 11:267-274) and can prolong survival of tumor-bearing mice (Kim, WJ. et al., (2006) Mol. Ther. 14:343-350; Li. S. et al., (2007) Mol. Ther. 15:515-523). RNA interference has also shown success with local delivery to the CNS by direct injection (Dorn. G. et al., (2004) Nucleic Acids 32:e49; Tan. PH. et al. (2005) Gene Ther. 12:59-66; Makimura, H. et a.l (2002) BMC Neurosci. 3:18; Shishkina, GT., et al. (2004) Neuroscience 129:521-528; Thakker, ER., et al. (2004) Proc. Natl. Acad. Sci. U.S.A. 101:17270-17275; Akaneya. Y., et al. (2005) J. Neurophysiol. 93:594-602) and to the lungs by intranasal administration (Howard, KA. et al., (2006) Mol. Ther. 14:476-484; Zhang. X. et al., (2004) J. Biol. Chem. 279:10677-10684; Bitko. V. et al., (2005) Nat. Med. 11:50-55). For administering a RNAi agent systemically for the treatment of a discase, the RNA can be modified or alternatively delivered using a drug delivery system; both methods act to prevent the rapid degradation of the dsRNA by endo- and exo-nucleases in vivo. Modification of the RNA or the pharmaceutical carrier can also permit targeting of the RNAi agent to the target tissue and avoid undesirable off-target effects (e.g., without wishing to be bound by theory, use of GNAs as described herein has been identified to destabilize the seed region of a dsRNA, resulting in enhanced preference of such dsRNAs for on-target effectiveness, relative to off-target effects, as such off-target effects are significantly weakened by such seed region destabilization). RNAi agents can be modified by chemical conjugation to lipophilic groups such as cholesterol to enhance cellular uptake and prevent degradation. For example. a RNAi agent directed against ApoB conjugated to a lipophilic cholesterol moicty was injected systemically into mice and resulted in knockdown of apoB mRNA in both the liver and jejunum (Soutschek, J. et al., (2004) Nature 432:173-178). Conjugation of an RNAi agent to an aptamer has been shown to inhibit tumor growth and mediate tumor regression in a mouse model of prostate cancer (McNamara, JO. et al., (2006) Nat. Biotechnol. 24:1005-1015). In an alternative embodiment, the RNAi agent can be delivered using drug delivery systems such as a nanoparticle, a dendrimer, a polymer, liposomes, or a cationic delivery system. Positively charged cationic delivery systems facilitate binding of molecule RNAi agent (negatively charged) and also enhance interactions at the negatively charged cell membrane to permit efficient uptake of an RNAi agent by the cell. Cationic lipids, dendrimers, or polymers can either be bound to an RNAi agent, or induced to form a vesicle or micelle (see e.g., Kim SH. et al., (2008) Journal of Controlled Release 129(2): 107-116) that encases an RNAi agent. The formation of vesicles or micelles further prevents degradation of the RNAi agent when administered systemically. Methods for making and administering cationic-RNAi agent complexes are well within the abilities of one skilled in the art (see e.g., Sorensen, DR., et al. (2003) J. Mol. Biol 327:761-766; Verma, UN. et al., (2003) Clin. Cancer Res. 9:1291-1300; Arnold, AS et al. (2007) J. Hypertens. 25:197-205, which are incorporated herein by reference in their entirety). Some non-limiting examples of drug delivery systems useful for systemic delivery of RNAi agents include DOTAP (Sorensen, DR., et al (2003), supra; Verma, UN. et al., (2003), supra), Oligofectamine, “solid nucleic acid lipid particles” (Zimmermann, TS. et al., (2006) Nature 441:111-114), cardiolipin (Chien, PY. et al., (2005) Cancer Gene Ther. 12:321-328; Pal, A. et al., (2005) Int J. Oncol. 26:1087-1091), polyethyleneimine (Bonnet ME. et al., (2008) Pharm. Res. Aug 16 Epub ahead of print; Aigner, A. (2006) J. Biomed. Biotechnol. 71659), Arg-Gly-Asp (RGD) peptides (Liu, S. (2006) Mol. Pharm. 3:472-487), and polyamidoamines (Tomalia, DA. et al., (2007) Biochem. Soc. Trans. 35:61-67; Yoo, H. et al., (1999) Pharm. Res. 16:1799-1804). In some embodiments, a RNAi agent forms a complex with cyclodextrin for systemic administration. Methods for administration and pharmaceutical compositions of RNAi agents and cyclodextrins can be found in U.S. Pat. No. 7,427, 605, which is herein incorporated by reference in its entirety.

[0543] Certain aspects of the instant disclosure relate to a method of reducing the expression of a SGLT2 gene in a cell, comprising contacting said cell with the double-stranded RNAi agent of the disclosure. In one embodiment, the cell is a hepatic cell, optionally a hepatocyte. In one embodiment, the cell is a renal cell.

[0544] In certain embodiments, the RNAi agent is taken up on one or more tissue or cell types present in organs, e.g., liver, kidney.

[0545] Another aspect of the disclosure relates to a method of reducing the expression and/or activity of a SGLT2 gene in a subject, comprising administering to the subject the double-stranded RNAi agent of the disclosure.

[0546] Another aspect of the disclosure relates to a method of treating a subject having a SGLT2-associated disorder or at risk of having or at risk of developing a SGLT2-associated disorder, comprising administering to the subject a therapeutically effective amount of the double-stranded RNAi agent of the disclosure, thereby treating the subject. In some embodiments, the SGLT2-associated disorder comprises a metabolic disease, e.g., diabetes, e.g., type I or type II diabetes. In some embodiments, the SGLT2-associated disorder comprises gout.

[0547] In one embodiment, the double-stranded RNAi agent is administered subcutaneously.

[0548] In one embodiment, the double-stranded RNAi agent is administered orally.

[0549] In one embodiment, the double-stranded RNAi agent is administered by intravenously.

[0550] In one embodiment, the double-stranded RNAi agent is administered by pulmonary sytem administration, e.g., intranasal administration, or oral inhalative administration.

[0551] For ease of exposition the formulations, compositions and methods in this section are discussed largely with regard to modified siRNA compounds. It may be understood, however, that these formulations, compositions and methods can be practiced with other siRNA compounds, e.g., unmodified siRNA compounds, and such practice is within the disclosure. A composition that includes a RNAi agent can be delivered to a subject by a variety of routes. Exemplary routes include pulmonary system, intravenous, subcutaneous, intraventricular, oral, topical, rectal, anal, vaginal, nasal, and ocular.

[0552] The RNAi agents of the disclosure can be incorporated into pharmaceutical compositions suitable for administration. Such compositions typically include one or more species of RNAi agent and a pharmaceutically acceptable carrier. As used herein the language “pharmaceutically acceptable carrier” is intended to include any and all solvents, dispersion media, coatings, antibacterial and antifungal agents, isotonic and absorption delaying agents, and the like, compatible with pharmaceutical administration. The use of such media and agents for pharmaceutically active substances is well known in the art. Except insofar as any conventional media or agent is incompatible with the active compound, use thereof in the compositions is contemplated. Supplementary active compounds can also be incorporated into the compositions.

[0553] The pharmaceutical compositions of the present disclosure may be administered in a number of ways depending upon whether local or systemic treatment is desired and upon the area to be treated. Administration may be intratracheal, intranasal, topical (including ophthalmic, vaginal, rectal, intranasal, transdermal), oral, parenteral, or pulmonary, e.g., by inhalation or insufflation of powders or aerosols, including by nebulizer. Parenteral administration includes intravenous drip, subcutaneous, intraperitoneal, or intramuscular injection, or intrathecal or intraventricular administration.

[0554] The route and site of administration may be chosen to enhance targeting. For example, to target muscle cells, intramuscular injection into the muscles of interest would be a logical choice. Lung cells might be targeted by administering the RNAi agent in powder or aerosol form. The vascular endothelial cells could be targeted by coating a balloon catheter with the RNAi agent and mechanically introducing the RNA.

[0555] Compositions for pulmonary system delivery may include aqueous solutions, e.g., for intranasal or oral inhalative administration, suitable carriers composed of, e.g., lipids (liposomes, niosomes, microemulsions, lipidic micelles, solid lipid nanoparticles) or polymers (polymer micelles, dendrimers, polymeric nanoparticles, nonogels, nanocapsules), adjuvant, e.g., for oral inhalative administration. Aqueous compositions may be sterile and may optionally contain buffers, diluents, absorbtion enhancers and other suitable additives. Such administration permits both systemic and local delivery of the double stranded RNAi agents of the invention.

[0556] Intranasal administration may include instilling or insufflating a double stranded RNAi agent into the nasal cavity with syringes or droppers by applying a few drops at a time or via atomization. Suitable dosage forms for intranasal administration include drops, powders, nebulized mists, and sprays. Nasal delivery devices include, but not limited to, vapor inhaler, nasal dropper, spray bottle, metered dose spray pump, gas driven spray atomizer, nebulizer, mechanical powder sprayer, breath actuated inhaler, and insufflator. Devices for delivery deeper into the respiratory system, e.g., into the lung, include nebulizer, pressured metered-dose inhaler, dry powder inhaler, and thermal vaporization acrosol device. Devices for delivery by inhalation are available from commercial suppliers. Devices can be fixed or variable dose, single or multidose, disposable or reusable depending on, for example, the disease or disorder to be prevented or treated, the volume of the agent to be delivered, the frequency of delivery of the agent, and other considerations in the art.

[0557] Oral inhalative administration may include use of device, e.g., a passive breath driven or active power driven single/-multiple dose dry powder inhaler (DPI), to deliver a double stranded RNAi agent to the pulmonary system. Suitable dosage forms for oral inhalative administration include powders and solutions. Suitable devices for oral inhalative administration include nebulizers, metered-dose inhalers, and dry powder inhalers. Dry powder inhalers are of the most popular devices used to deliver drugs, especially proteins to the lungs. Exemplary commercially available dry powder inhalers include Spinhaler (Fisons Pharmaceuticals, Rochester, NY) and Rotahaler (GSK, RTP, NC). Several types of nebulizers are available, namely jet nebulizers, ultrasonic nebulizers, vibrating mesh nebulizers. Jet nebulizers are driven by compressed air. Ultrasonic nebulizers use a piezoelectric transducer in order to create droplets from an open liquid reservoir. Vibrating mesh nebulizers use perforated membranes actuated by an annular piczoclement to vibrate in resonant bending mode. The holes in the membrane have a large cross-section size on the liquid supply side and a narrow cross-section size on the side from where the droplets emerge. Depending on the therapeutic application, the hole sizes and number of holes can be adjusted. Selection of a suitable device depends on parameters, such as nature of the drug and its formulation, the site of action, and pathophysiology of the lung. Aqueous suspensions and solutions are nebulized effectively. Acrosols based on mechanically generated vibration mesh technologies also have been used successfully to deliver proteins to lungs.

[0558] The amount of RNAi agent for pulmonary system administration may vary from one target gene to another target gene and the appropriate amount that has to be applied may have to be determined individually for cach target gene. Typically, this amount ranges from 10 μg to 2 mg, or 50 ug to 1500 μg, or 100 μg to 1000 μg.

[0559] Formulations for topical administration may include transdermal patches, ointments, lotions, creams, gels, drops, suppositories, sprays, liquids, and powders. Conventional pharmaceutical carriers, aqueous, powder or oily bases, thickeners and the like may be necessary or desirable. Coated condoms, gloves, and the like may also be useful.

[0560] Compositions for oral administration include powders or granules, suspensions or solutions in water, syrups, clixirs or non-aqueous media, tablets, capsules, lozenges, or troches. In the case of tablets, carriers that can be used include lactose, sodium citrate and salts of phosphoric acid. Various disintegrants such as starch, and lubricating agents such as magnesium stearate, sodium lauryl sulfate and talc, are commonly used in tablets. For oral administration in capsule form, useful diluents are lactose and high molecular weight polyethylene glycols. When aqueous suspensions are required for oral use, the nucleic acid compositions can be combined with emulsifying and suspending agents. If desired, certain sweetening or flavoring agents can be added. Compositions suitable for oral administration of the agents of the invention are further described in PCT Application No. PCT/US20/33156, the entire contents of which are incorporated herein by reference.

[0561] Compositions for intrathecal or intraventricular administration may include sterile aqueous solutions which may also contain buffers, diluents, and other suitable additives.

[0562] Formulations for parenteral administration may include sterile aqueous solutions which may also contain buffers, diluents, and other suitable additives. Intraventricular injection may be facilitated by an intraventricular catheter, for example, attached to a reservoir. For intravenous use, the total concentration of solutes may be controlled to render the preparation isotonic.

[0563] In one embodiment, the administration of the siRNA compound, e.g., a double-stranded siRNA compound, is parenteral, e.g., intravenous (e.g., as a bolus or as a diffusible infusion), intradermal, intraperitoneal, intramuscular, intrathecal, intraventricular, intracranial, subcutaneous, transmucosal, buccal, sublingual, endoscopic, rectal, oral, vaginal, topical, pulmonary system, intranasal, urethral, or ocular. Administration can be provided by the subject or by another person, e.g., a health care provider. The medication can be provided in measured doses or in a dispenser which delivers a metered dose. Selected modes of delivery are discussed in more detail below.

### Vector Encoded RNAi Agents of the Disclosure

[0564] RNAi agents targeting the SGLT2 gene can be expressed from transcription units inserted into DNA or RNA vectors (see, e.g., Couture, A, et al., TIG. (1996), 12:5-10; WO 00/22113, WO 00/22114, and U.S. Pat. No. 6,054,299). Expression can be sustained (months or longer), depending upon the specific construct used and the target tissue or cell type. These transgenes can be introduced as a linear construct, a circular plasmid, or a viral vector, which can be an integrating or non-integrating vector. The transgene can also be constructed to permit it to be inherited as an extrachromosomal plasmid (Gassmann, et al., (1995) Proc. Natl. Acad. Sci. USA 92:1292).

[0565] The individual strand or strands of a RNAi agent can be transcribed from a promoter on an expression vector. Where two separate strands are to be expressed to generate, for example, a dsRNA, two separate expression vectors can be co-introduced (e.g., by transfection or infection) into a target cell. Alternatively, each individual strand of a dsRNA can be transcribed by promoters both of which are located on the same expression plasmid. In one embodiment, a dsRNA is expressed as inverted repeat polynucleotides joined by a linker polynucleotide sequence such that the dsRNA has a stem and loop structure.

[0566] RNAi agent expression vectors are generally DNA plasmids or viral vectors. Expression vectors compatible with eukaryotic cells, such as those compatible with vertebrate cells, can be used to produce recombinant constructs for the expression of a RNAi agent as described herein. Delivery of RNAi agent expressing vectors can be systemic, such as by intravenous or intramuscular administration, by administration to target cells ex-planted from the patient followed by reintroduction into the patient, or by any other means that allows for introduction into a desired target cell.

[0567] Viral vector systems which can be utilized with the methods and compositions described herein include, but are not limited to, (a) adenovirus vectors; (b) retrovirus vectors, including but not limited to lentiviral vectors, moloney murine leukemia virus, etc.; (c) adeno-associated virus vectors; (d) herpes simplex virus vectors; (e) SV 40 vectors; (f) polyoma virus vectors; (g) papilloma virus vectors; (h) picornavirus vectors; (i) pox virus vectors such as an orthopox, e.g., vaccinia virus vectors or avipox, e.g. canary pox or fowl pox; and (j) a helper-dependent or gutless adenovirus. Replication-defective viruses can also be advantageous. Different vectors will or will not become incorporated into the cells' genome. The constructs can include viral sequences for transfection, if desired. Alternatively, the construct can be incorporated into vectors capable of episomal replication, e.g. EPV and EBV vectors. Constructs for the recombinant expression of a RNAi agent will generally require regulatory elements, e.g., promoters, enhancers, etc., to ensure the expression of the RNAi agent in target cells. Other aspects to consider for vectors and constructs are known in the art.

### VI. Pharmaceutical Compositions of the Invention

[0568] The present disclosure also includes pharmaceutical compositions and formulations which include the RNAi agents of the disclosure. In one embodiment, provided herein are pharmaceutical compositions containing an RNAi agent, as described herein, and a pharmaceutically acceptable carrier. The pharmaceutical compositions containing the RNAi agent are useful for treating a subject who would benefit from inhibiting or reducing the expression of a SGLT2 gene, e.g., a subject having a SGLT2 -associated disorder, e.g., a subject having or at risk of having or at risk of developing gout or diabetes, e.g., type I or type II diabets. Such pharmaceutical compositions are formulated based on the mode of delivery. One example is compositions that are formulated for systemic administration via parenteral delivery, e.g., by intravenous (IV), intramuscular (IM), or for subcutaneous (subQ) delivery.

[0569] In some embodiments, the pharmaceutical compositions of the invention are pyrogen free or non-pyrogenic.

[0570] The pharmaceutical compositions of the disclosure may be administered in dosages sufficient to inhibit expression of a SGLT2 gene. In general, a suitable dose of an RNAi agent of the disclosure will be a flat dose in the range of about 0.001 to about 200.0 mg about once per month to about once per year, typically about once per quarter (i.e., about once every three months) to about once per year, generally a flat dose in the range of about 1 to 50 mg about once per month to about once per year. typically about once per quarter to about once per year. In certain embodiments, the dose will be a fixed dose, e.g., a fixed dose of about 25 μg to about 5 mg.

[0571] A repeat-dose regimen may include administration of a therapeutic amount of a RNAi agent on a regular basis, such as monthly to once every six months. In certain embodiments, the RNAi agent is administered about once per quarter (i.e., about once every three months) to about twice per year, particularly for treatment of a chronic disease.

[0572] After an initial treatment regimen (e.g., loading dose), of once per day, twice per week, once per week, the treatments can be administered on a less frequent basis.

[0573] In other embodiments, a single dose of the pharmaceutical compositions can be long lasting. such that subsequent doses are administered at not more than 1, 2, 3, or 4 or more month intervals. In some embodiments of the disclosure, a single dose of the pharmaceutical compositions of the disclosure is administered once per month. In other embodiments of the disclosure, a single dose of the pharmaceutical compositions of the disclosure is administered once per quarter to twice per year.

[0574] The skilled artisan will appreciate that certain factors can influence the dosage and timing required to effectively treat a subject, including but not limited to the severity of the disease or disorder, previous treatments, the general health or age of the subject, and other diseases present. Moreover, treatment of a subject with a therapeutically effective amount of a composition can include a single treatment or a series of treatments.

[0575] Advances in mouse genetics have generated a number of mouse models for the study of various SGLT2-associated diseases that would benefit from reduction in the expression of SGLT2. Such models can be used for in vivo testing of RNAi agents, as well as for determining a therapeutically effective dose. Suitable mouse models are known in the art and include, for example, the mouse models described elsewhere herein.

[0576] The pharmaceutical compositions of the present disclosure can be administered in a number of ways depending upon whether local or systemic treatment is desired and upon the area to be treated. Administration can be topical (e.g., by a transdermal patch), pulmonary system administration by intranasal administration or oral inhalative administration, e.g., by inhalation or insufflation of powders or aerosols, including by nebulizer; intratracheal, epidermal and transdermal, oral or parenteral. Parenteral administration includes intravenous, intraarterial, subcutaneous, intraperitoneal or intramuscular injection or infusion; subdermal, e.g., via an implanted device; or intracranial, e.g., by intraparenchymal, intrathecal or intraventricular, administration.

[0577] The RNAi agents can be delivered in a manner to target a particular tissue, such as the liver or kidney.

[0578] Pharmaceutical compositions and formulations for topical administration can include transdermal patches, ointments, lotions, creams, gels, drops, suppositories, sprays, liquids and powders. Conventional pharmaceutical carriers, aqueous, powder or oily bases, thickeners and the like can be necessary or desirable. Coated condoms, gloves and the like can also be useful. Suitable topical formulations include those in which the RNAi agents featured in the disclosure are in admixture with a topical delivery agent such as lipids, liposomes, fatty acids, fatty acid esters, steroids, chelating agents and surfactants. Suitable lipids and liposomes include neutral (e.g., diolcoylphosphatidyl DOPE ethanolamine, dimyristoylphosphatidyl choline DMPC, distearolyphosphatidyl choline) negative (e.g., dimyristoylphosphatidyl glycerol DMPG) and cationic (e.g., dioleoyltetramethylaminopropyl DOTAP and dioleoylphosphatidyl ethanolamine DOTMA). RNAi agents featured in the disclosure can be encapsulated within liposomes or can form complexes thereto, in particular to cationic liposomes. Alternatively, RNAi agents can be complexed to lipids, in particular to cationic lipids. Suitable fatty acids and esters include but are not limited to arachidonic acid, oleic acid, cicosanoic acid, lauric acid, caprylic acid, capric acid, myristic acid, palmitic acid, stearic acid, linoleic acid, linolenic acid, dicaprate, tricaprate, monoolein, dilaurin, glyceryl 1-monocaprate, 1-dodecylazacycloheptan-2-one, an acylcarnitine, an acylcholine, or a C₁₋₂₀ alkyl ester (e.g., isopropylmyristate IPM), monoglyceride, diglyceride or pharmaceutically acceptable salt thereof. Topical formulations are described in detail in U.S. Pat. No. 6,747,014, which is incorporated herein by reference.

### A. RNAi Agent Formulations Comprising Membranous Molecular Assemblies

[0579] A RNAi agent for use in the compositions and methods of the disclosure can be formulated for delivery in a membranous molecular assembly, e.g., a liposome or a micelle. As used herein, the term “liposome” refers to a vesicle composed of amphiphilic lipids arranged in at least one bilayer, e.g., one bilayer or a plurality of bilayers. Liposomes include unilamellar and multilamellar vesicles that have a membrane formed from a lipophilic material and an aqueous interior. The aqueous portion contains the RNAi agent composition. The lipophilic material isolates the aqueous interior from an aqueous exterior, which typically does not include the RNAi agent composition, although in some examples, it may . Liposomes are useful for the transfer and delivery of active ingredients to the site of action. Because the liposomal membrane is structurally similar to biological membranes, when liposomes are applied to a tissue, the liposomal bilayer fuses with bilayer of the cellular membranes. As the merging of the liposome and cell progresses, the internal aqueous contents that include the RNAi agent are delivered into the cell where the RNAi agent can specifically bind to a target RNA and can mediate RNAi. In some cases the liposomes are also specifically targeted, e.g., to direct the RNAi agent to particular cell types.

[0580] A liposome containing an RNAi agent can be prepared by a variety of methods. In one example, the lipid component of a liposome is dissolved in a detergent so that micelles are formed with the lipid component. For example, the lipid component can be an amphipathic cationic lipid or lipid conjugate. The detergent can have a high critical micelle concentration and may be nonionic. Exemplary detergents include cholate, CHAPS, octylglucoside, deoxycholate, and lauroyl sarcosine. The RNAi agent preparation is then added to the micelles that include the lipid component. The cationic groups on the lipid interact with the RNAi agent and condense around the RNAi agent to form a liposome. After condensation, the detergent is removed, e.g., by dialysis, to yield a liposomal preparation of RNAi agent.

[0581] If necessary a carrier compound that assists in condensation can be added during the condensation reaction, e.g., by controlled addition. For example, the carrier compound can be a polymer other than a nucleic acid (e.g., spermine or spermidine). pH can also adjusted to favor condensation.

[0582] Methods for producing stable polynucleotide delivery vehicles, which incorporate a polynucleotide/cationic lipid complex as structural components of the delivery vehicle, are further described in, e.g., WO 96/37194, the entire contents of which are incorporated herein by reference. Liposome formation can also include one or more aspects of exemplary methods described in Felgner, P. L. et al., (1987) Proc. Natl. Acad. Sci. USA 8:7413-7417; U.S. Pat. Nos. 4,897,355; 5,171,678; Bangham et al., (1965) M. Mol. Biol. 23:238; Olson et al., (1979) Biochim. Biophys. Acta 557:9; Szoka et al., (1978) Proc. Natl. Acad. Sci. 75: 4194; Mayhew et al., (1984) Biochim. Biophys. Acta 775:169; Kim et al., (1983) Biochim. Biophys. Acta 728:339; and Fukunaga et al., (1984) Endocrinol. 115:757. Commonly used techniques for preparing lipid aggregates of appropriate size for use as delivery vehicles include sonication and freeze-thaw plus extrusion (see, e.g., Mayer et al., (1986) Biochim. Biophys. Acta 858:161. Microfluidization can be used when consistently small (50 to 200 nm) and relatively uniform aggregates are desired (Mayhew et al., (1984) Biochim. Biophys. Acta 775:169. These methods are readily adapted to packaging RNAi agent preparations into liposomes.

[0583] Liposomes fall into two broad classes. Cationic liposomes are positively charged liposomes which interact with the negatively charged nucleic acid molecules to form a stable complex. The positively charged nucleic acid/liposome complex binds to the negatively charged cell surface and is internalized in an endosome. Due to the acidic pH within the endosome, the liposomes are ruptured, releasing their contents into the cell cytoplasm (Wang et al. (1987) Biochem. Biophys. Res. Commun., 147:980-985).

[0584] Liposomes, which are pH-sensitive or negatively charged, entrap nucleic acids rather than complex with them. Since both the nucleic acid and the lipid are similarly charged, repulsion rather than complex formation occurs. Nevertheless, some nucleic acid is entrapped within the aqueous interior of these liposomes. pH sensitive liposomes have been used to deliver nucleic acids encoding the thymidine kinase gene to cell monolayers in culture. Expression of the exogenous gene was detected in the target cells (Zhou et al. (1992) Journal of Controlled Release, 19:269-274).

[0585] One major type of liposomal composition includes phospholipids other than naturally-derived phosphatidylcholine. Neutral liposome compositions, for example, can be formed from dimyristoyl phosphatidylcholine (DMPC) or dipalmitoyl phosphatidylcholine (DPPC). Anionic liposome compositions generally are formed from dimyristoyl phosphatidylglycerol, while anionic fusogenic liposomes are formed primarily from dioleoyl phosphatidylethanolamine (DOPE). Another type of liposomal composition is formed from phosphatidylcholine (PC) such as, for example, soybean PC, and egg PC. Another type is formed from mixtures of phospholipid or phosphatidylcholine or cholesterol.

[0586] Examples of other methods to introduce liposomes into cells in vitro and in vivo include U.S. Pat. Nos. 5,283,185; 5,171,678; WO 94/00569; WO 93/24640; WO 91/16024; Felgner, (1994) J. Biol. Chem. 269:2550; Nabel, (1993) Proc. Natl. Acad. Sci. 90:11307; Nabel, (1992) Human Gene Ther. 3:649; Gershon, (1993) Biochem. 32:7143; and Strauss, (1992) EMBO J. 11:417.

[0587] Non-ionic liposomal systems have also been examined to determine their utility in the delivery of drugs to the skin, in particular systems comprising non-ionic surfactant and cholesterol. Non-ionic liposomal formulations comprising Novasome™ I (glyceryl dilaurate/cholesterol/polyoxyethylene-10-stearyl ether) and Novasome™ II (glyceryl distearate/cholesterol/polyoxyethylene-10-stearyl ether) were used to deliver cyclosporin-A into the dermis of mouse skin. Results indicated that such non-ionic liposomal systems were effective in facilitating the deposition of cyclosporine A into different layers of the skin (Hu et al., (1994) S.T.P.Pharma. Sci., 4(6):466).

[0588] Liposomes also include “sterically stabilized” liposomes, a term which, as used herein, refers to liposomes comprising one or more specialized lipids that, when incorporated into liposomes, result in enhanced circulation lifetimes relative to liposomes lacking such specialized lipids. Examples of sterically stabilized liposomes are those in which part of the vesicle-forming lipid portion of the liposome (A) comprises one or more glycolipids, such as monosialoganglioside G_{M1}, or (B) is derivatized with one or more hydrophilic polymers, such as a polyethylene glycol (PEG) moiety. While not wishing to be bound by any particular theory, it is thought in the art that, at least for sterically stabilized liposomes containing gangliosides, sphingomyelin, or PEG-derivatized lipids, the enhanced circulation half-life of these sterically stabilized liposomes derives from a reduced uptake into cells of the reticuloendothelial system (RES) (Allen et al., (1987) FEBS Letters, 223:42; Wu et al., (1993) Cancer Research, 53:3765).

[0589] Various liposomes comprising one or more glycolipids are known in the art. Papahadjopoulos et al. (Ann. N.Y. Acad. Sci., (1987), 507:64) reported the ability of monosialoganglioside G_{M1}. galactocerebroside sulfate and phosphatidylinositol to improve blood half-lives of liposomes. These findings were expounded upon by Gabizon et al. (Proc. Natl. Acad. Sci. U.S.A., (1988), 85,:6949). U.S. Pat. No. 4,837,028 and WO 88/04924, both to Allen et al., disclose liposomes comprising (1) sphingomyelin and (2) the ganglioside G_{M1} or a galactocerebroside sulfate ester. U.S. Pat. No. 5,543,152 (Webb et al.) discloses liposomes comprising sphingomyelin. Liposomes comprising 1,2-sn-dimyristoylphosphatidylcholine are disclosed in WO 97/13499 (Lim et al).

[0590] In one embodiment, cationic liposomes are used. Cationic liposomes possess the advantage of being able to fuse to the cell membrane. Non-cationic liposomes, although not able to fuse as efficiently with the plasma membrane, are taken up by macrophages in vivo and can be used to deliver RNAi agents to macrophages.

[0591] Further advantages of liposomes include: liposomes obtained from natural phospholipids are biocompatible and biodegradable; liposomes can incorporate a wide range of water and lipid soluble drugs; liposomes can protect encapsulated RNAi agents in their internal compartments from metabolism and degradation (Rosoff, in “Pharmaceutical Dosage Forms,” Lieberman, Rieger and Banker (Eds.), 1988, volume 1, p. 245). Important considerations in the preparation of liposome formulations are the lipid surface charge, vesicle size and the aqueous volume of the liposomes.

[0592] A positively charged synthetic cationic lipid, N-[1-(2,3-dioleyloxy)propyl]-N,N,N-trimethylammonium chloride (DOTMA) can be used to form small liposomes that interact spontaneously with nucleic acid to form lipid-nucleic acid complexes which are capable of fusing with the negatively charged lipids of the cell membranes of tissue culture cells, resulting in delivery of RNAi agent (see, e.g., Felgner, P. L. et al., (1987) Proc. Natl. Acad. Sci. USA 8:7413-7417, and U.S. Pat. No. 4,897,355 for a description of DOTMA and its use with DNA).

[0593] A DOTMA analogue, 1,2-bis(olcoyloxy)-3-(trimethylammonia)propane (DOTAP) can be used in combination with a phospholipid to form DNA-complexing vesicles. LipofectinTM Bethesda Research Laboratories, Gaithersburg, Md.) is an effective agent for the delivery of highly anionic nucleic acids into living tissue culture cells that comprise positively charged DOTMA liposomes which interact spontaneously with negatively charged polynucleotides to form complexes. When enough positively charged liposomes are used, the net charge on the resulting complexes is also positive. Positively charged complexes prepared in this way spontaneously attach to negatively charged cell surfaces, fuse with the plasma membrane, and efficiently deliver functional nucleic acids into, for example, tissue culture cells. Another commercially available cationic lipid, 1,2-bis(olcoyloxy)-3,3-(trimethylammonia)propane (“DOTAP”) (Bochringer Mannheim, Indianapolis, Indiana) differs from DOTMA in that the oleoyl moieties are linked by ester, rather than ether linkages.

[0594] Other reported cationic lipid compounds include those that have been conjugated to a variety of moieties including, for example, carboxyspermine which has been conjugated to one of two types of lipids and includes compounds such as 5-carboxyspermylglycine dioctaoleoylamide (“DOGS”) (Transfectam™, Promega, Madison, Wisconsin) and dipalmitoylphosphatidylethanolamine 5-carboxyspermyl-amide (“DPPES”) (see, e.g., U.S. Pat. No. 5,171,678).

[0595] Another cationic lipid conjugate includes derivatization of the lipid with cholesterol (“DC-Chol”) which has been formulated into liposomes in combination with DOPE (See, Gao, X. and Huang. L., (1991) Biochim. Biophys. Res. Commun. 179:280). Lipopolylysine, made by conjugating polylysine to DOPE, has been reported to be effective for transfection in the presence of serum (Zhou, X. et al., (1991) Biochim. Biophys. Acta 1065:8). For certain cell lines, these liposomes containing conjugated cationic lipids, are said to exhibit lower toxicity and provide more efficient transfection than the DOTMA-containing compositions. Other commercially available cationic lipid products include DMRIE and DMRIE-HP (Vical, La Jolla, California) and Lipofectamine (DOSPA) (Life Technology, Inc., Gaithersburg, Maryland). Other cationic lipids suitable for the delivery of oligonucleotides are described in WO 98/39359 and WO 96/37194.

[0596] Liposomal formulations are particularly suited for topical administration, liposomes present several advantages over other formulations. Such advantages include reduced side effects related to high systemic absorption of the administered drug, increased accumulation of the administered drug at the desired target, and the ability to administer RNAi agent into the skin. In some implementations, liposomes are used for delivering RNAi agent to epidermal cells and also to enhance the penetration of RNAi agent into dermal tissues, e.g., into skin. For example, the liposomes can be applied topically. Topical delivery of drugs formulated as liposomes to the skin has been documented (see, e.g., Weiner et al., (1992) Journal of Drug Targeting, vol. 2,405-410 and du Plessis et al., (1992) Antiviral Research, 18:259-265; Mannino, R. J. and Fould-Fogerite, S., (1998) Biotechniques 6:682-690; Itani, T. et al., (1987) Gene 56:267-276; Nicolau, C. et al. (1987) Meth. Enzymol. 149:157-176; Straubinger, R. M. and Papahadjopoulos, D. (1983) Meth. Enzymol. 101:512-527; Wang, C. Y. and Huang. L., (1987) Proc. Natl. Acad. Sci. USA 84:7851-7855).

[0597] Non-ionic liposomal systems have also been examined to determine their utility in the delivery of drugs to the skin, in particular systems comprising non-ionic surfactant and cholesterol. Non-ionic liposomal formulations comprising Novasome I (glyceryl dilaurate/cholesterol/polyoxyethylene-10-stearyl ether) and Novasome II (glyceryl distearate/cholesterol/polyoxyethylene-10-stearyl ether) were used to deliver a drug into the dermis of mouse skin. Such formulations with RNAi agent are useful for treating a dermatological disorder.

[0598] Liposomes that include RNAi agents can be made highly deformable. Such deformability can enable the liposomes to penetrate through pore that are smaller than the average radius of the liposome. For example, transfersomes are a type of deformable liposomes. Transferosomes can be made by adding surface edge activators, usually surfactants, to a standard liposomal composition. Transfersomes that include RNAi agent can be delivered, for example, subcutaneously by infection in order to deliver RNAi agent to keratinocytes in the skin. In order to cross intact mammalian skin, lipid vesicles must pass through a series of fine pores, each with a diameter less than 50 nm, under the influence of a suitable transdermal gradient. In addition, due to the lipid properties, these transferosomes can be self-optimizing (adaptive to the shape of pores, e.g., in the skin), self-repairing, and can frequently reach their targets without fragmenting, and often self-loading.

[0599] Other formulations amenable to the present disclosure are described in U.S. provisional application Ser. No. 61/018,616, filed Jan. 2, 2008; 61/018,611, filed Jan. 2, 2008; 61/039,748, filed Mar. 26, 2008; 61/047,087, filed Apr. 22, 2008 and 61/051,528, filed May 8, 2008. PCT application number PCT/US2007/080331, filed Oct. 3, 2007, also describes formulations that are amenable to the present disclosure.

[0600] Transfersomes, yet another type of liposomes, are highly deformable lipid aggregates which are attractive candidates for drug delivery vehicles. Transfersomes can be described as lipid droplets which are so highly deformable that they are easily able to penetrate through pores which are smaller than the droplet. Transfersomes are adaptable to the environment in which they are used, e.g., they are self-optimizing (adaptive to the shape of pores in the skin), self-repairing, frequently reach their targets without fragmenting, and often self-loading. To make transfersomes it is possible to add surface edge-activators, usually surfactants, to a standard liposomal composition. Transfersomes have been used to deliver serum albumin to the skin. The transfersome-mediated delivery of serum albumin has been shown to be as effective as subcutaneous injection of a solution containing serum albumin.

[0601] Surfactants find wide application in formulations such as those described herein, particularlay in emulsions (including microemulsions) and liposomes. The most common way of classifying and ranking the properties of the many different types of surfactants, both natural and synthetic, is by the use of the hydrophile/lipophile balance (HLB). The nature of the hydrophilic group (also known as the “head”) provides the most useful means for categorizing the different surfactants used in formulations (Rieger, in Pharmaceutical Dosage Forms, Marcel Dekker, Inc., New York, N.Y., 1988, p. 285).

[0602] If the surfactant molecule is not ionized, it is classified as a nonionic surfactant. Nonionic surfactants find wide application in pharmaceutical and cosmetic products and are usable over a wide range of pH values. In general, their HLB values range from 2 to about 18 depending on their structure. Nonionic surfactants include nonionic esters such as ethylene glycol esters, propylene glycol esters, glyceryl esters, polyglyceryl esters, sorbitan esters, sucrose esters, and ethoxylated esters. Nonionic alkanolamides and ethers such as fatty alcohol ethoxylates, propoxylated alcohols, and ethoxylated/propoxylated block polymers are also included in this class. The polyoxyethylene surfactants are the most popular members of the nonionic surfactant class.

[0603] If the surfactant molecule carries a negative charge when it is dissolved or dispersed in water, the surfactant is classified as anionic. Anionic surfactants include carboxylates such as soaps, acyl lactylates, acyl amides of amino acids, esters of sulfuric acid such as alkyl sulfates and ethoxylated alkyl sulfates, sulfonates such as alkyl benzene sulfonates, acyl isethionates, acyl taurates and sulfosuccinates, and phosphates. The most important members of the anionic surfactant class are the alkyl sulfates and the soaps.

[0604] If the surfactant molecule carries a positive charge when it is dissolved or dispersed in water, the surfactant is classified as cationic. Cationic surfactants include quaternary ammonium salts and ethoxylated amines. The quaternary ammonium salts are the most used members of this class.

[0605] If the surfactant molecule has the ability to carry either a positive or negative charge, the surfactant is classified as amphoteric. Amphoteric surfactants include acrylic acid derivatives, substituted alkylamides, N-alkylbetaines and phosphatides.

The use of surfactants in drug products, formulations and in emulsions has been reviewed (Rieger, in Pharmaceutical Dosage Forms, Marcel Dekker, Inc., New York, N.Y., 1988, p. 285).

[0606] The RNAi agent for use in the methods of the disclosure can also be provided as micellar formulations. “Micelles” are defined herein as a particular type of molecular assembly in which amphipathic molecules are arranged in a spherical structure such that all the hydrophobic portions of the molecules are directed inward, leaving the hydrophilic portions in contact with the surrounding aqueous phase. The converse arrangement exists if the environment is hydrophobic.

[0607] A mixed micellar formulation suitable for delivery through transdermal membranes may be prepared by mixing an aqueous solution of the siRNA composition, an alkali metal C₈ to C₂₂ alkyl sulphate, and a micelle forming compounds. Exemplary micelle forming compounds include lecithin, hyaluronic acid, pharmaceutically acceptable salts of hyaluronic acid, glycolic acid, lactic acid, chamomile extract, cucumber extract, oleic acid, linoleic acid, linolenic acid, monoolein, monooleates, monolaurates, borage oil, evening of primrose oil, menthol, trihydroxy oxo cholanyl glycine and pharmaceutically acceptable salts thereof, glycerin, polyglycerin, lysine, polylysine, triolein, polyoxyethylene ethers and analogues thereof, polidocanol alkyl ethers and analogues thereof, chenodeoxycholate, deoxycholate, and mixtures thereof. The micelle forming compounds may be added at the same time or after addition of the alkali metal alkyl sulphate. Mixed micelles will form with substantially any kind of mixing of the ingredients but vigorous mixing in order to provide smaller size micelles.

[0608] In one method a first micellar composition is prepared which contains the siRNA composition and at least the alkali metal alkyl sulphate. The first micellar composition is then mixed with at least three micelle forming compounds to form a mixed micellar composition. In another method, the micellar composition is prepared by mixing the siRNA composition, the alkali metal alkyl sulphate and at least one of the micelle forming compounds, followed by addition of the remaining micelle forming compounds, with vigorous mixing.

[0609] Phenol or m-cresol may be added to the mixed micellar composition to stabilize the formulation and protect against bacterial growth. Alternatively, phenol or m-cresol may be added with the micelle forming ingredients. An isotonic agent such as glycerin may also be added after formation of the mixed micellar composition.

[0610] For delivery of the micellar formulation as a spray, the formulation can be put into an aerosol dispenser and the dispenser is charged with a propellant. The propellant, which is under pressure, is in liquid form in the dispenser. The ratios of the ingredients are adjusted so that the aqueous and propellant phases become one, i.e., there is one phase. If there are two phases, it is necessary to shake the dispenser prior to dispensing a portion of the contents, e.g., through a metered valve. The dispensed dose of pharmaceutical agent is propelled from the metered valve in a fine spray.

[0611] Propellants may include hydrogen-containing chlorofluorocarbons, hydrogen-containing fluorocarbons, dimethyl ether and diethyl ether. In certain embodiments, HFA 134a (1,1,1,2 tetrafluoroethane) may be used.

[0612] The specific concentrations of the essential ingredients can be determined by relatively straightforward experimentation. For absorption through the oral cavities, it is often desirable to increase, e.g., at least double or triple, the dosage for through injection or administration through the gastrointestinal tract.

### Lipid Particles

[0613] RNAi agents, e.g., dsRNAs of in the disclosure may be fully encapsulated in a lipid formulation, e.g., a LNP, or other nucleic acid-lipid particle.

[0614] As used herein, the term “LNP” refers to a stable nucleic acid-lipid particle. LNPs typically contain a cationic lipid, a non-cationic lipid, and a lipid that prevents aggregation of the particle (e.g., a PEG-lipid conjugate). LNPs are extremely useful for systemic applications, as they exhibit extended circulation lifetimes following intravenous (i.v.) injection and accumulate at distal sites (e.g., sites physically separated from the administration site). LNPs include “pSPLP,” which include an encapsulated condensing agent-nucleic acid complex as set forth in WO 00/03683. The particles of the present disclosure typically have a mean diameter of about 50 nm to about 150 nm, more typically about 60 nm to about 130 nm, more typically about 70 nm to about 110 nm, most typically about 70 nm to about 90 nm, and are substantially nontoxic. In addition, the nucleic acids when present in the nucleic acid-lipid particles of the present disclosure are resistant in aqueous solution to degradation with a nuclease. Nucleic acid-lipid particles and their method of preparation are disclosed in, e.g., U.S. Pat. Nos. 5,976,567; 5,981,501; 6,534,484; 6,586,410; 6,815,432; United States Patent publication No. 2010/0324120 and WO 96/40964.

[0615] In one embodiment, the lipid to drug ratio (mass/mass ratio) (e.g., lipid to dsRNA ratio) will be in the range of from about 1:1 to about 50:1, from about 1:1 to about 25:1, from about 3:1 to about 15:1, from about 4:1 to about 10:1, from about 5:1 to about 9:1, or about 6:1 to about 9:1. Ranges intermediate to the above recited ranges are also contemplated to be part of the disclosure.

[0616] Certain specific LNP formulations for delivery of RNAi agents have been described in the art, including, e.g., “LNP01” formulations as described in, e.g., WO 2008/042973, which is hereby incorporated by reference.

[0617] Additional exemplary lipid-dsRNA formulations are identified in the table below.

| | | cationic lipid/non-cationic |
|---|---|---|
| | | lipid/cholesterol/PEG-lipid conjugate |
| | Ionizable/Cationic Lipid | Lipid:siRNA ratio |
| SNALP-1 | 1,2-Dilinolenyloxy-N,N- | DLinDMA/DPPC/Cholesterol/PEG- |
| | dimethylaminopropane (DLinDMA) | CDMA |
| | | (57.1/7.1/34.4/1.4) |
| | | lipid:siRNA ~ 7:1 |
| 2-XTC | 2,2-Dilinoleyl-4-dimethylaminoethyl-[1,3]- | XTC/DPPC/Cholesterol/PEG-CDMA |
| | dioxolane (XTC) | 57.1/7.1/34.4/1.4 |
| | | lipid:siRNA ~ 7:1 |
| LNP05 | 2,2-Dilinoleyl-4-dimethylaminoethyl-[1,3]- | XTC/DSPC/Cholesterol/PEG-DMG |
| | dioxolane (XTC) | 57.5/7.5/31.5/3.5 |
| | | lipid:siRNA ~ 6:1 |
| LNP06 | 2,2-Dilinoleyl-4-dimethylaminoethyl-[1,3]- | XTC/DSPC/Cholesterol/PEG-DMG |
| | dioxolane (XTC) | 57.5/7.5/31.5/3.5 |
| | | lipid:siRNA ~ 11:1 |
| LNP07 | 2,2-Dilinoleyl-4-dimethylaminoethyl-[1,3]- | XTC/DSPC/Cholesterol/PEG-DMG |
| | dioxolane (XTC) | 60/7.5/31/1.5, |
| | | lipid:siRNA ~ 6:1 |
| LNP08 | 2,2-Dilinoleyl-4-dimethylaminoethyl-[1,3]- | XTC/DSPC/Cholesterol/PEG-DMG |
| | dioxolane (XTC) | 60/7.5/31/1.5, |
| | | lipid:siRNA ~ 11:1 |
| LNP09 | 2,2-Dilinoleyl-4-dimethylaminoethyl-[1,3]- | XTC/DSPC/Cholesterol/PEG-DMG |
| | dioxolane (XTC) | 50/10/38.5/1.5 |
| | | Lipid:siRNA 10:1 |
| LNP10 | (3aR,5s,6aS)-N,N-dimethyl-2,2- | ALN100/DSPC/Cholesterol/PEG- |
| | di((9Z,12Z)-octadeca-9,12- | DMG |
| | dienyl)tetrahydro-3aH- | 50/10/38.5/1.5 |
| | cyclopenta[d][1,3]dioxol-5-amine | Lipid:siRNA 10:1 |
| | (ALN100) | |
| LNP11 | (6Z,9Z,28Z,31Z)-heptatriaconta-6,9,28,31- | MC-3/DSPC/Cholesterol/PEG-DMG |
| | tetraen-19-yl 4-(dimethylamino)butanoate | 50/10/38.5/1.5 |
| | (MC3) | Lipid:siRNA 10:1 |
| LNP12 | 1,1′-(2-(4-(2-((2-(bis(2- | Tech G1/DSPC/Cholesterol/PEG- |
| | hydroxydodecyl)amino)ethyl)(2- | DMG |
| | hydroxydodecyl)amino)ethyl)piperazin-1- | 50/10/38.5/1.5 |
| | yl)ethylazanediyl)didodecan-2-ol (Tech | Lipid:siRNA 10:1 |
| | G1) | |
| LNP13 | XTC | XTC/DSPC/Chol/PEG-DMG |
| | | 50/10/38.5/1.5 |
| | | Lipid:siRNA: 33:1 |
| LNP14 | MC3 | MC3/DSPC/Chol/PEG-DMG |
| | | 40/15/40/5 |
| | | Lipid:siRNA: 11:1 |
| LNP15 | MC3 | MC3/DSPC/Chol/PEG-DSG/GalNAc- |
| | | PEG-DSG |
| | | 50/10/35/4.5/0.5 |
| | | Lipid:siRNA: 11:1 |
| LNP16 | MC3 | MC3/DSPC/Chol/PEG-DMG |
| | | 50/10/38.5/1.5 |
| | | Lipid:siRNA: 7:1 |
| LNP17 | MC3 | MC3/DSPC/Chol/PEG-DSG |
| | | 50/10/38.5/1.5 |
| | | Lipid:siRNA: 10:1 |
| LNP18 | MC3 | MC3/DSPC/Chol/PEG-DMG |
| | | 50/10/38.5/1.5 |
| | | Lipid:siRNA: 12:1 |
| LNP19 | MC3 | MC3/DSPC/Chol/PEG-DMG |
| | | 50/10/35/5 |
| | | Lipid:siRNA: 8:1 |
| LNP20 | MC3 | MC3/DSPC/Chol/PEG-DPG |
| | | 50/10/38.5/1.5 |
| | | Lipid:siRNA: 10:1 |
| LNP21 | C12-200 | C12-200/DSPC/Chol/PEG-DSG |
| | | 50/10/38.5/1.5 |
| | | Lipid:siRNA: 7:1 |
| LNP22 | XTC | XTC/DSPC/Chol/PEG-DSG |
| | | 50/10/38.5/1.5 |
| | | Lipid:siRNA: 10:1 |

DSPC: distearoylphosphatidylcholine
DPPC: dipalmitoylphosphatidylcholine
PEG-DMG: PEG-didimyristoyl glycerol (C14-PEG, or PEG-C14) (PEG with avg mol wt of 2000)
PEG-DSG: PEG-distyryl glycerol (C18-PEG, or PEG-C18) (PEG with avg mol wt of 2000)
PEG-CDMA: PEG-carbamoyl-1,2-dimyristyloxypropylamine (PEG with avg mol wt of 2000)
SNALP (1,2-Dilinolenyloxy-N,N-dimethylaminopropane (DLinDMA)) comprising formulations are described in WO 2009/127060, which is hereby incorporated by reference.
XTC comprising formulations are described in WO 2010/088537, the entire contents of which are hereby incorporated herein by reference.
MC3 comprising formulations are described, e.g., in United States Patent Publication No. 2010/0324120, the entire contents of which are hereby incorporated by reference.
ALNY-100 comprising formulations are described in WO 2010/054406, the entire contents of which are hereby incorporated herein by reference.
C12-200 comprising formulations are described in WO 2010/129709, the entire contents of which are hereby incorporated herein by reference.

[0618] Compositions and formulations for oral administration include powders or granules, microparticulates, nanoparticulates, suspensions or solutions in water or non-aqueous media, capsules, gel capsules, sachets, tablets or minitablets. Thickeners, flavoring agents, diluents, emulsifiers, dispersing aids or binders can be desirable. In some embodiments, oral formulations are those in which dsRNAs featured in the disclosure are administered in conjunction with one or more penetration enhancer surfactants and chelators. Suitable surfactants include fatty acids or esters or salts thereof, bile acids or salts thereof. Suitable bile acids/salts include chenodeoxycholic acid (CDCA) and ursodeoxychenodeoxycholic acid (UDCA), cholic acid, dehydrocholic acid, deoxycholic acid, glucholic acid, glycholic acid, glycodeoxycholic acid, taurocholic acid, taurodeoxycholic acid, sodium tauro-24,25-dihydro-fusidate and sodium glycodihydrofusidate. Suitable fatty acids include arachidonic acid, undecanoic acid, oleic acid, lauric acid, caprylic acid, capric acid, myristic acid, palmitic acid, stearic acid, linoleic acid, linolenic acid, dicaprate, tricaprate, monoolein, dilaurin, glyceryl 1-monocaprate, 1-dodecylazacycloheptan-2-one, an acylcarnitine, an acylcholine, or a monoglyceride, a diglyceride or a pharmaceutically acceptable salt thereof (e.g., sodium). In some embodiments, combinations of penetration enhancers are used, for example, fatty acids/salts in combination with bile acids/salts. One exemplary combination is the sodium salt of lauric acid, capric acid and UDCA. Further penetration enhancers include polyoxyethylene-9-lauryl ether, polyoxyethylene-20-cetyl ether. DsRNAs featured in the disclosure can be delivered orally, in granular form including sprayed dried particles, or complexed to form micro or nanoparticles. DsRNA complexing agents include poly-amino acids; polyimines; polyacrylates; polyalkylacrylates, polyoxethanes, polyalkylcyanoacrylates; cationized gelatins, albumins, starches, acrylates, polyethyleneglycols (PEG) and starches; polyalkylcyanoacrylates; DEAE-derivatized polyimines, pollulans, celluloses and starches. Suitable complexing agents include chitosan, N-trimethylchitosan, poly-L-lysine, polyhistidine, polyornithine, polyspermines, protamine, polyvinylpyridine, polythiodiethylaminomethylethylene P(TDAE), polyaminostyrene (e.g., p-amino), poly(methylcyanoacrylate), poly(ethylcyanoacrylate), poly(butylcyanoacrylate), poly(isobutylcyanoacrylate), poly(isohexylcynaoacrylate), DEAE-methacrylate, DEAE-hexylacrylate, DEAE-acrylamide, DEAE-albumin and DEAE-dextran, polymethylacrylate, polyhexylacrylate, poly(D,L-lactic acid), poly(DL-lactic-co-glycolic acid (PLGA), alginate, and polyethyleneglycol (PEG). Oral formulations for dsRNAs and their preparation are described in detail in U.S. Pat. No. 6,887,906, U.S. 2003/0027780, and U.S. Pat. No. 6,747.014, each of which is incorporated herein by reference.

[0619] Compositions for pulmonary system delivery may include aqueous solutions, e.g., for intranasal or oral inhalative administration, suitable carriers composed of, e.g., lipids (liposomes, niosomes, microemulsions, lipidic micelles, solid lipid nanoparticles) or polymers (polymer micelles, dendrimers, polymeric nanoparticles, nonogels, nanocapsules), adjuvant, e.g., for oral inhalative administration. Aqueous compositions may be sterile and may optionally contain buffers, diluents, absorbtion enhancers and other suitable additives.

[0620] Compositions and formulations for parenteral, intraparenchymal (into the brain), intrathecal, intraventricular or intrahepatic administration can include sterile aqueous solutions which can also contain buffers, diluents and other suitable additives such as, but not limited to, penetration enhancers, carrier compounds and other pharmaceutically acceptable carriers or excipients.

[0621] Pharmaceutical compositions of the present disclosure include, but are not limited to, solutions, emulsions, and liposome-containing formulations. These compositions can be generated from a variety of components that include, but are not limited to, preformed liquids, self-emulsifying solids and self-emulsifying semisolids. Particularly useful formulations include those that target the brain when treating SGLT2-associated diseases or disorders.

[0622] The pharmaceutical formulations of the present disclosure, which can conveniently be presented in unit dosage form, can be prepared according to conventional techniques well known in the pharmaceutical industry. Such techniques include the step of bringing into association the active ingredients with the pharmaceutical carrier(s) or excipient(s). In general, the formulations are prepared by uniformly and intimately bringing into association the active ingredients with liquid carriers or finely divided solid carriers or both, and then, if necessary, shaping the product.

[0623] The compositions of the present disclosure can be formulated into any of many possible dosage forms such as, but not limited to, tablets, capsules, gel capsules, liquid syrups, soft gels, suppositories, and enemas. The compositions of the present disclosure can also be formulated as suspensions in aqueous, non-aqueous or mixed media. Aqueous suspensions can further contain substances which increase the viscosity of the suspension including, for example, sodium carboxymethylcellulose, sorbitol or dextran. The suspension can also contain stabilizers.

### Additional Formulations

[0624] i. Emulsions

[0625] The compositions of the present disclosure can be prepared and formulated as emulsions. Emulsions are typically heterogeneous systems of one liquid dispersed in another in the form of droplets usually exceeding 0.1 μm in diameter (see e.g., Ansel's Pharmaceutical Dosage Forms and Drug Delivery Systems, Allen, LV., Popovich NG., and Ansel HC., 2004, Lippincott Williams & Wilkins (8th ed.), New York, NY; Idson, in Pharmaceutical Dosage Forms, Lieberman, Rieger and Banker (Eds.), 1988, Marcel Dekker, Inc., New York, N.Y., volume 1, p. 199; Rosoff, in Pharmaceutical Dosage Forms, Lieberman, Rieger and Banker (Eds.), 1988, Marcel Dekker, Inc., New York, N.Y., Volume 1. p. 245; Block in Pharmaceutical Dosage Forms, Lieberman, Rieger and Banker (Eds.), 1988, Marcel Dekker, Inc., New York, N.Y., volume 2, p. 335; Higuchi et al., in Remington's Pharmaceutical Sciences, Mack Publishing Co., Easton, Pa., 1985, p. 301). Emulsions are often biphasic systems comprising two immiscible liquid phases intimately mixed and dispersed with each other. In general, emulsions can be of either the water-in-oil (w/o) or the oil-in-water (o/w) variety. When an aqueous phase is finely divided into and dispersed as minute droplets into a bulk oily phase, the resulting composition is called a water-in-oil (w/o) emulsion. Alternatively, when an oily phase is finely divided into and dispersed as minute droplets into a bulk aqueous phase, the resulting composition is called an oil-in-water (o/w) emulsion. Emulsions can contain additional components in addition to the dispersed phases, and the active drug which can be present as a solution in either aqueous phase, oily phase or itself as a separate phase. Pharmaceutical excipients such as emulsifiers, stabilizers, dyes, and anti-oxidants can also be present in emulsions as needed. Pharmaceutical emulsions can also be multiple emulsions that are comprised of more than two phases such as, for example, in the case of oil-in-water-in-oil (o/w/o) and water-in-oil-in-water (w/o/w) emulsions. Such complex formulations often provide certain advantages that simple binary emulsions do not. Multiple emulsions in which individual oil droplets of an o/w emulsion enclose small water droplets constitute a w/o/w emulsion. Likewise, a system of oil droplets enclosed in globules of water stabilized in an oily continuous phase provides an o/w/o emulsion.

[0626] Emulsions are characterized by little or no thermodynamic stability. Often, the dispersed or discontinuous phase of the emulsion is well dispersed into the external or continuous phase and maintained in this form through the means of emulsifiers or the viscosity of the formulation. Either of the phases of the emulsion can be a semisolid or a solid, as is the case of emulsion-style ointment bases and creams. Other means of stabilizing emulsions entail the use of emulsifiers that can be incorporated into either phase of the emulsion. Emulsifiers can broadly be classified into four categories: synthetic surfactants, naturally occurring emulsifiers, absorption bases, and finely dispersed solids (see e.g., Ansel's Pharmaceutical Dosage Forms and Drug Delivery Systems, Allen, LV., Popovich NG., and Ansel HC., 2004, Lippincott Williams & Wilkins (8th ed.), New York, NY; Idson, in Pharmaceutical Dosage Forms, Lieberman, Rieger and Banker (Eds.), 1988, Marcel Dekker, Inc., New York, N.Y., volume 1. p. 199).

[0627] Synthetic surfactants, also known as surface active agents, have found wide applicability in the formulation of emulsions and have been reviewed in the literature (see e.g., Ansel's Pharmaceutical Dosage Forms and Drug Delivery Systems, Allen, LV., Popovich NG., and Ansel HC., 2004, Lippincott Williams & Wilkins (8th ed.), New York, NY; Rieger, in Pharmaceutical Dosage Forms, Lieberman, Rieger and Banker (Eds.), 1988, Marcel Dekker, Inc., New York, N. Y., volume 1. p. 285; Idson, in Pharmaceutical Dosage Forms, Lieberman, Rieger and Banker (Eds.), Marcel Dekker, Inc., New York, N.Y., 1988, volume 1, p. 199). Surfactants are typically amphiphilic and comprise a hydrophilic and a hydrophobic portion. The ratio of the hydrophilic to the hydrophobic nature of the surfactant has been termed the hydrophile/lipophile balance (HLB) and is a valuable tool in categorizing and selecting surfactants in the preparation of formulations. Surfactants can be classified into different classes based on the nature of the hydrophilic group: nonionic, anionic, cationic and amphoteric (see e.g., Ansel's Pharmaceutical Dosage Forms and Drug Delivery Systems, Allen, LV., Popovich NG., and Ansel HC., 2004, Lippincott Williams & Wilkins (8th ed.), New York, NY Rieger, in Pharmaceutical Dosage Forms, Lieberman, Rieger and Banker (Eds.), 1988, Marcel Dekker, Inc., New York, N.Y., volume 1. p. 285).

[0628] Naturally occurring emulsifiers used in emulsion formulations include lanolin, beeswax, phosphatides, lecithin and acacia. Absorption bases possess hydrophilic properties such that they can soak up water to form w/o emulsions yet retain their semisolid consistencies, such as anhydrous lanolin and hydrophilic petrolatum. Finely divided solids have also been used as good emulsifiers especially in combination with surfactants and in viscous preparations. These include polar inorganic solids, such as heavy metal hydroxides, nonswelling clays such as bentonite, attapulgite, hectorite, kaolin, montmorillonite, colloidal aluminum silicate and colloidal magnesium aluminum silicate, pigments and nonpolar solids such as carbon or glyceryl tristearate.

[0629] A large variety of non-emulsifying materials are also included in emulsion formulations and contribute to the properties of emulsions. These include fats, oils, waxes, fatty acids, fatty alcohols, fatty esters, humectants, hydrophilic colloids, preservatives and antioxidants (Block, in Pharmaceutical Dosage Forms, Lieberman, Rieger and Banker (Eds.), 1988, Marcel Dekker, Inc., New York, N.Y., volume 1, p. 335; Idson, in Pharmaceutical Dosage Forms, Lieberman, Rieger and Banker (Eds.), 1988, Marcel Dekker, Inc., New York, N.Y., volume 1, p. 199).

[0630] Hydrophilic colloids or hydrocolloids include naturally occurring gums and synthetic polymers such as polysaccharides (for example, acacia, agar, alginic acid, carrageenan, guar gum, karaya gum, and tragacanth), cellulose derivatives (for example, carboxymethylcellulose and carboxypropylcellulose), and synthetic polymers (for example, carbomers, cellulose ethers, and carboxyvinyl polymers). These disperse or swell in water to form colloidal solutions that stabilize emulsions by forming strong interfacial films around the dispersed-phase droplets and by increasing the viscosity of the external phase.

[0631] Since emulsions often contain a number of ingredients such as carbohydrates, proteins, sterols and phosphatides that can readily support the growth of microbes, these formulations often incorporate preservatives. Commonly used preservatives included in emulsion formulations include methyl paraben, propyl paraben, quaternary ammonium salts, benzalkonium chloride, esters of p-hydroxybenzoic acid, and boric acid. Antioxidants are also commonly added to emulsion formulations to prevent deterioration of the formulation. Antioxidants used can be free radical scavengers such as tocopherols, alkyl gallates, butylated hydroxyanisole, butylated hydroxytoluene, or reducing agents such as ascorbic acid and sodium metabisulfite, and antioxidant synergists such as citric acid, tartaric acid, and lecithin.

[0632] The application of emulsion formulations via dermatological, oral and parenteral routes and methods for their manufacture have been reviewed in the literature (see e.g., Ansel's Pharmaceutical Dosage Forms and Drug Delivery Systems, Allen, LV., Popovich NG., and Ansel HC., 2004, Lippincott Williams & Wilkins (8th ed.), New York, NY; Idson, in Pharmaceutical Dosage Forms, Lieberman, Rieger and Banker (Eds.), 1988, Marcel Dekker, Inc., New York, N.Y., volume 1, p. 199). Emulsion formulations for oral delivery have been very widely used because of ease of formulation, as well as efficacy from an absorption and bioavailability standpoint (see e.g., Ansel's Pharmaceutical Dosage Forms and Drug Delivery Systems, Allen, LV., Popovich NG., and Ansel HC., 2004, Lippincott Williams & Wilkins (8th ed.), New York, NY; Rosoff, in Pharmaceutical Dosage Forms, Lieberman, Rieger and Banker (Eds.), 1988, Marcel Dekker, Inc., New York, N.Y., volume 1, p. 245; Idson, in Pharmaceutical Dosage Forms, Lieberman, Rieger and Banker (Eds.), 1988, Marcel Dekker, Inc., New York, N.Y., volume 1, p. 199). Mineral-oil base laxatives, oil-soluble vitamins and high fat nutritive preparations are among the materials that have commonly been administered orally as o/w emulsions.

ii. Microemulsions

[0633] In one embodiment of the present disclosure, the compositions of RNAi agents and nucleic acids are formulated as microemulsions. A microemulsion can be defined as a system of water, oil and amphiphile which is a single optically isotropic and thermodynamically stable liquid solution (see e.g., Ansel's Pharmaceutical Dosage Forms and Drug Delivery Systems, Allen, LV., Popovich NG., and Ansel HC., 2004, Lippincott Williams & Wilkins (8th ed.), New York, NY; Rosoff, in Pharmaceutical Dosage Forms, Lieberman, Rieger and Banker (Eds.), 1988, Marcel Dekker, Inc., New York, N.Y., volume 1. p. 245). Typically, microemulsions are systems that are prepared by first dispersing an oil in an aqueous surfactant solution and then adding a sufficient amount of a fourth component, generally an intermediate chain-length alcohol to form a transparent system. Therefore, microemulsions have also been described as thermodynamically stable, isotropically clear dispersions of two immiscible liquids that are stabilized by interfacial films of surface-active molecules (Leung and Shah, in: Controlled Release of Drugs: Polymers and Aggregate Systems, Rosoff, M., Ed., 1989, VCH Publishers, New York, pages 185-215). Microemulsions commonly are prepared via a combination of three to five components that include oil, water, surfactant, cosurfactant and electrolyte. Whether the microemulsion is of the water-in-oil (w/o) or an oil-in-water (o/w) type is dependent on the properties of the oil and surfactant used, and on the structure and geometric packing of the polar heads and hydrocarbon tails of the surfactant molecules (Schott, in Remington's Pharmaceutical Sciences, Mack Publishing Co., Easton, Pa., 1985, p. 271).

[0634] The phenomenological approach utilizing phase diagrams has been extensively studied and has yielded a comprehensive knowledge, to one skilled in the art, of how to formulate microemulsions (see e.g., Ansel's Pharmaceutical Dosage Forms and Drug Delivery Systems, Allen, LV., Popovich NG., and Ansel HC., 2004, Lippincott Williams & Wilkins (8th ed.), New York, NY; Rosoff, in Pharmaceutical Dosage Forms, Lieberman, Rieger and Banker (Eds.), 1988, Marcel Dekker, Inc.,

[0635] New York, N.Y., volume 1, p. 245; Block, in Pharmaceutical Dosage Forms, Lieberman, Rieger and Banker (Eds.), 1988, Marcel Dekker, Inc., New York, N.Y., volume 1, p. 335). Compared to conventional emulsions, microemulsions offer the advantage of solubilizing water-insoluble drugs in a formulation of thermodynamically stable droplets that are formed spontaneously.

[0636] Surfactants used in the preparation of microemulsions include, but are not limited to, ionic surfactants, non-ionic surfactants, Brij 96, polyoxyethylene oleyl ethers, polyglycerol fatty acid esters, tetraglycerol monolaurate (ML310), tetraglycerol monooleate (MO310), hexaglycerol monooleate (PO310), hexaglycerol pentaoleate (PO500), decaglycerol monocaprate (MCA750), decaglycerol monooleate (MO750), decaglycerol sequioleate (SO750), decaglycerol decaoleate (DAO750), alone or in combination with cosurfactants. The cosurfactant, usually a short-chain alcohol such as ethanol, 1-propanol, and 1-butanol, serves to increase the interfacial fluidity by penetrating into the surfactant film and consequently creating a disordered film because of the void space generated among surfactant molecules. Microemulsions can, however, be prepared without the use of cosurfactants and alcohol-free self-emulsifying microemulsion systems are known in the art. The aqueous phase can typically be, but is not limited to, water, an aqueous solution of the drug, glycerol, PEG300, PEG400, polyglycerols, propylene glycols, and derivatives of ethylene glycol. The oil phase can include, but is not limited to, materials such as Captex 300, Captex 355, Capmul MCM, fatty acid esters, medium chain (C8-C12) mono, di, and tri-glycerides, polyoxyethylated glyceryl fatty acid esters, fatty alcohols, polyglycolized glycerides, saturated polyglycolized C8-C10 glycerides, vegetable oils and silicone oil.

[0637] Microemulsions are particularly of interest from the standpoint of drug solubilization and the enhanced absorption of drugs. Lipid based microemulsions (both o/w and w/o) have been proposed to enhance the oral bioavailability of drugs, including peptides (see e.g., U.S. Pat. Nos. 6,191,105; 7,063,860; 7,070,802; 7,157,099; Constantinides et al., Pharmaceutical Research, 1994, 11, 1385-1390; Ritschel, Meth. Find. Exp. Clin. Pharmacol., 1993, 13, 205). Microemulsions afford advantages of improved drug solubilization, protection of drug from enzymatic hydrolysis, possible enhancement of drug absorption due to surfactant-induced alterations in membrane fluidity and permeability, case of preparation, case of oral administration over solid dosage forms, improved clinical potency, and decreased toxicity (see e.g., U.S. Pat. Nos. 6,191,105; 7.063,860; 7,070,802; 7,157,099; Constantinides et al., Pharmaceutical Research, 1994, 11, 1385; Ho et al., J. Pharm. Sci., 1996, 85, 138-143). Often microemulsions can form spontaneously when their components are brought together at ambient temperature. This can be particularly advantageous when formulating thermolabile drugs, peptides or RNAi agents. Microemulsions have also been effective in the transdermal delivery of active components in both cosmetic and pharmaceutical applications. It is expected that the microemulsion compositions and formulations of the present disclosure will facilitate the increased systemic absorption of RNAi agents and nucleic acids from the gastrointestinal tract, as well as improve the local cellular uptake of RNAi agents and nucleic acids.

[0638] Microemulsions of the present disclosure can also contain additional components and additives such as sorbitan monostearate (Grill 3), Labrasol, and penetration enhancers to improve the properties of the formulation and to enhance the absorption of the RNAi agents and nucleic acids of the present disclosure. Penetration enhancers used in the microemulsions of the present disclosure can be classified as belonging to one of five broad categories—surfactants, fatty acids, bile salts, chelating agents, and non-chelating non-surfactants (Lee et al., Critical Reviews in Therapeutic Drug Carrier Systems, 1991. p. 92). Each of these classes has been discussed above.

iii. Microparticles

[0639] An RNAi agent of the disclosure may be incorporated into a particle, e.g., a microparticle. Microparticles can be produced by spray-drying, but may also be produced by other methods including lyophilization, evaporation, fluid bed drying, vacuum drying, or a combination of these techniques.

iv. Penetration Enhancers

[0640] In one embodiment, the present disclosure employs various penetration enhancers to effect the efficient delivery of nucleic acids, particularly RNAi agents, to the skin of animals. Most drugs are present in solution in both ionized and nonionized forms. However, usually only lipid soluble or lipophilic drugs readily cross cell membranes. It has been discovered that even non-lipophilic drugs can cross cell membranes if the membrane to be crossed is treated with a penetration enhancer. In addition to aiding the diffusion of non-lipophilic drugs across cell membranes, penetration enhancers also enhance the permeability of lipophilic drugs.

[0641] Penetration enhancers can be classified as belonging to one of five broad categories, i.e., surfactants, fatty acids, bile salts, chelating agents, and non-chelating non-surfactants (see e.g., Malmsten, M. Surfactants and polymers in drug delivery, Informa Health Care, New York, NY, 2002; Lee et al., Critical Reviews in Therapeutic Drug Carrier Systems, 1991, p.92). Each of the above mentioned classes of penetration enhancers are described below in greater detail.

[0642] Surfactants (or “surface-active agents”) are chemical entities which, when dissolved in an aqueous solution, reduce the surface tension of the solution or the interfacial tension between the aqueous solution and another liquid, with the result that absorption of RNAi agents through the mucosa is enhanced. In addition to bile salts and fatty acids, these penetration enhancers include, for example, sodium lauryl sulfate, polyoxyethylene-9-lauryl ether and polyoxyethylene-20-cetyl ether) (see e.g., Malmsten, M. Surfactants and polymers in drug delivery, Informa Health Care, New York, NY. 2002; Lee et al., Critical Reviews in Therapeutic Drug Carrier Systems, 1991, p.92); and perfluorochemical emulsions, such as FC-43. Takahashi et al., J. Pharm. Pharmacol., 1988, 40, 252).

[0643] Various fatty acids and their derivatives which act as penetration enhancers include, for example, oleic acid, lauric acid, capric acid (n-decanoic acid), myristic acid, palmitic acid, stearic acid, linoleic acid, linolenic acid, dicaprate, tricaprate, monoolein (1-monooleoyl-rac-glycerol), dilaurin, caprylic acid, arachidonic acid, glycerol 1-monocaprate, 1-dodecylazacycloheptan-2-one, acylcarnitines, acylcholines, C₁₋₂₀ alkyl esters thereof (e.g., methyl, isopropyl and t-butyl), and mono- and di-glycerides thereof (i.e., oleate, laurate, caprate, myristate, palmitate, stearate, linoleate, etc.) (see e.g., Touitou, E., et al. Enhancement in Drug Delivery, CRC Press, Danvers, MA, 2006; Lec et al., Critical Reviews in Therapeutic Drug Carrier Systems, 1991, p.92; Muranishi, Critical Reviews in Therapeutic Drug Carrier Systems, 1990, 7, 1-33; El Hariri et al., J. Pharm. Pharmacol., 1992, 44, 651-654).

[0644] The physiological role of bile includes the facilitation of dispersion and absorption of lipids and fat-soluble vitamins (see e.g., Malmsten, M. Surfactants and polymers in drug delivery, Informa Health Care, New York, NY, 2002; Brunton, Chapter 38 in: Goodman & Gilman's The Pharmacological Basis of Therapeutics, 9th Ed., Hardman et al. Eds., McGraw-Hill, New York, 1996, pp. 934-935). Various natural bile salts, and their synthetic derivatives, act as penetration enhancers. Thus the term “bile salts” includes any of the naturally occurring components of bile as well as any of their synthetic derivatives. Suitable bile salts include, for example, cholic acid (or its pharmaceutically acceptable sodium salt, sodium cholate), dehydrocholic acid (sodium dehydrocholate), deoxycholic acid (sodium deoxycholate), glucholic acid (sodium glucholate), glycholic acid (sodium glycocholate), glycodeoxycholic acid (sodium glycodeoxycholate), taurocholic acid (sodium taurocholate), taurodeoxycholic acid (sodium taurodeoxycholate), chenodeoxycholic acid (sodium chenodeoxycholate), ursodeoxycholic acid (UDCA), sodium tauro-24,25-dihydro-fusidate (STDHF), sodium glycodihydrofusidate and polyoxyethylene-9-lauryl ether (POE) (see e.g., Malmsten, M. Surfactants and polymers in drug delivery, Informa Health Care, New York, NY, 2002; Lee et al., Critical Reviews in Therapeutic Drug Carrier Systems, 1991, page 92; Swinyard, Chapter 39 In: Remington's Pharmaceutical Sciences, 18th Ed., Gennaro, ed., Mack Publishing Co., Easton, Pa., 1990, pages 782-783; Muranishi, Critical Reviews in Therapeutic Drug Carrier Systems, 1990, 7, 1-33; Yamamoto et al., J. Pharm. Exp. Ther., 1992, 263, 25; Yamashita et al., J. Pharm. Sci., 1990, 79, 579-583).

[0645] Chelating agents, as used in connection with the present disclosure, can be defined as compounds that remove metallic ions from solution by forming complexes therewith, with the result that absorption of RNAi agents through the mucosa is enhanced. With regards to their use as penetration enhancers in the present disclosure, chelating agents have the added advantage of also serving as DNase inhibitors, as most characterized DNA nucleases require a divalent metal ion for catalysis and are thus inhibited by chelating agents (Jarrett, J. Chromatogr., 1993, 618, 315-339). Suitable chelating agents include but are not limited to disodium ethylenediaminetetraacetate (EDTA), citric acid, salicylates (e.g., sodium salicylate, 5-methoxysalicylate and homovanilate), N-acyl derivatives of collagen, laureth-9 and N-amino acyl derivatives of beta-diketones (enamines) (see e.g., Katdare, A. et al., Excipient development for pharmaceutical, biotechnology, and drug delivery, CRC Press, Danvers, MA, 2006; Lee et al., Critical Reviews in Therapeutic Drug Carrier Systems, 1991, page 92; Muranishi, Critical Reviews in Therapeutic Drug Carrier Systems, 1990, 7, 1-33; Buur et al., J. Control Rel., 1990, 14, 43-51).

[0646] As used herein, non-chelating non-surfactant penetration enhancing compounds can be defined as compounds that demonstrate insignificant activity as chelating agents or as surfactants but that nonetheless enhance absorption of RNAi agents through the alimentary mucosa (see e.g., Muranishi, Critical Reviews in Therapeutic Drug Carrier Systems, 1990, 7, 1-33). This class of penetration enhancers includes, for example, unsaturated cyclic ureas, 1-alkyl- and 1-alkenylazacyclo-alkanone derivatives (Lee et al., Critical Reviews in Therapeutic Drug Carrier Systems, 1991, page 92); and non-steroidal anti-inflammatory agents such as diclofenac sodium, indomethacin and phenylbutazone (Yamashita et al., J. Pharm. Pharmacol., 1987, 39, 621-626).

[0647] Agents that enhance uptake of RNAi agents at the cellular level can also be added to the pharmaceutical and other compositions of the present disclosure. For example, cationic lipids, such as lipofectin (Junichi et al. U.S. Pat. No. 5,705,188), cationic glycerol derivatives, and polycationic molecules, such as polylysine (WO 97/30731), are also known to enhance the cellular uptake of dsRNAs.

[0648] Other agents can be utilized to enhance the penetration of the administered nucleic acids, including glycols such as ethylene glycol and propylene glycol, pyrrols such as 2-pyrrol, azones, and terpenes such as limonene and menthone.

vi. Excipients

[0649] In contrast to a carrier compound, a “pharmaceutical carrier” or “excipient” is a pharmaceutically acceptable solvent, suspending agent or any other pharmacologically inert vehicle for delivering one or more nucleic acids to an animal. The excipient can be liquid or solid and is selected, with the planned manner of administration in mind, so as to provide for the desired bulk, consistency, etc., when combined with a nucleic acid and the other components of a given pharmaceutical composition. Typical pharmaceutical carriers include, but are not limited to, binding agents (e.g., pregelatinized maize starch, polyvinylpyrrolidone or hydroxypropyl methylcellulose, etc.); fillers (e.g., lactose and other sugars, microcrystalline cellulose, pectin, gelatin, calcium sulfate, ethyl cellulose, polyacrylates or calcium hydrogen phosphate, etc.); lubricants (e.g., magnesium stearate, talc, silica, colloidal silicon dioxide, stearic acid, metallic stearates, hydrogenated vegetable oils, corn starch, polyethylene glycols, sodium benzoate, sodium acetate, etc.); disintegrants (e.g., starch, sodium starch glycolate, etc.); and wetting agents (e.g., sodium lauryl sulphate, etc).

[0650] Pharmaceutically acceptable organic or inorganic excipients suitable for non-parenteral administration which do not deleteriously react with nucleic acids can also be used to formulate the compositions of the present disclosure. Suitable pharmaceutically acceptable carriers include, but are not limited to, water, salt solutions, alcohols, polyethylene glycols, gelatin, lactose, amylose, magnesium stearate, talc, silicic acid, viscous paraffin, hydroxymethylcellulose, polyvinylpyrrolidone and the like.

[0651] Formulations for topical administration of nucleic acids can include sterile and non-sterile aqueous solutions, non-aqueous solutions in common solvents such as alcohols, or solutions of the nucleic acids in liquid or solid oil bases. The solutions can also contain buffers, diluents and other suitable additives. Pharmaceutically acceptable organic or inorganic excipients suitable for non-parenteral administration which do not deleteriously react with nucleic acids can be used.

[0652] Suitable pharmaceutically acceptable excipients include, but are not limited to, water, salt solutions, alcohol, polyethylene glycols, gelatin, lactose, amylose, magnesium stearate, talc, silicic acid, viscous paraffin, hydroxymethylcellulose, polyvinylpyrrolidone and the like.

vii. Other Components

[0653] The compositions of the present disclosure can additionally contain other adjunct components conventionally found in pharmaceutical compositions, at their art-established usage levels. Thus, for example, the compositions can contain additional, compatible, pharmaceutically-active materials such as, for example, antipruritics, astringents, local anesthetics or anti-inflammatory agents, or can contain additional materials useful in physically formulating various dosage forms of the compositions of the present disclosure, such as dyes, flavoring agents, preservatives, antioxidants, opacifiers, thickening agents and stabilizers. However, such materials, when added, should not unduly interfere with the biological activities of the components of the compositions of the present disclosure. The formulations can be sterilized and, if desired, mixed with auxiliary agents, e.g., lubricants, preservatives, stabilizers, wetting agents, emulsifiers, salts for influencing osmotic pressure, buffers, colorings, flavorings or aromatic substances and the like which do not deleteriously interact with the nucleic acid(s) of the formulation.

[0654] Aqueous suspensions can contain substances which increase the viscosity of the suspension including, for example, sodium carboxymethylcellulose, sorbitol or dextran. The suspension can also contain stabilizers.

[0655] In some embodiments, pharmaceutical compositions featured in the disclosure include (a) one or more RNAi agents and (b) one or more agents which function by a non-RNAi mechanism and which are useful in treating a SGLT2-associated disorder. Examples of such agents include, but are not Imited to diabetes mellitus-treating agents, diabetic complication-treating agents, cardiovascular diseases-treating agents, anti-hyperlipemic agents, hypotensive or antihypertensive agents, anti-obesity agents, nonalcoholic steatohepatitis (NASH)-treating agents, chemotherapeutic agents, immunotherapeutic agents, immunosuppressive agents, and a combination of any of the foregoing.

[0656] Toxicity and therapeutic efficacy of such compounds can be determined by standard pharmaceutical procedures in cell cultures or experimental animals, e.g., for determining the LD₅₀ (the dose lethal to 50% of the population) and the ED₅₀ (the dose therapeutically effective in 50% of the population). The dose ratio between toxic and therapeutic effects is the therapeutic index and it can be expressed as the ratio LD₅₀/ED_{50.} Compounds that exhibit high therapeutic indices are preferred.

[0657] The data obtained from cell culture assays and animal studies can be used in formulating a range of dosage for use in humans. The dosage of compositions featured herein in the disclosure lies generally within a range of circulating concentrations that include the ED₅₀ with little or no toxicity. The dosage can vary within this range depending upon the dosage form employed and the route of administration utilized. For any compound used in the methods featured in the disclosure, the therapeutically effective dose can be estimated initially from cell culture assays. A dose can be formulated in animal models to achieve a circulating plasma concentration range of the compound or, when appropriate, of the polypeptide product of a target sequence (e.g., achieving a decreased concentration of the polypeptide) that includes the IC₅₀ (i.e., the concentration of the test compound which achieves a half-maximal inhibition of symptoms) as determined in cell culture. Such information can be used to more accurately determine useful doses in humans. Levels in plasma can be measured, for example, by high performance liquid chromatography.

[0658] In addition to their administration, as discussed above, the RNAi agents featured in the disclosure can be administered in combination with other known agents effective in treatment of pathological processes mediated by nucleotide repeat expression. In any event, the administering physician can adjust the amount and timing of RNAi agent administration on the basis of results observed using standard measures of efficacy known in the art or described herein.

### VII. Methods for Inhibiting SGLT2 Expression

[0659] The present disclosure also provides methods of inhibiting expression of a SGLT2 gene in a cell. The methods include contacting a cell with an RNAi agent, e.g., double stranded RNAi agent, in an amount effective to inhibit expression of a SGLT2 gene in the cell, thereby inhibiting expression of SGLT2 in the cell. In certain embodiments of the disclosure, expression of a SGLT2 gene is inhibited in liver cells (e.g., hepatocytes). In certain embodiments of the disclosure, expression of a SGLT2 gene is inhibited in kidney or renal cells.

[0660] Contacting of a cell with a RNAi agent, e.g., a double stranded RNAi agent, may be done in vitro or in vivo. Contacting a cell in vivo with the RNAi agent includes contacting a cell or group of cells within a subject, e.g., a human subject, with the RNAi agent. Combinations of in vitro and in vivo methods of contacting a cell are also possible.

[0661] Contacting a cell may be direct or indirect, as discussed above. Furthermore, contacting a cell may be accomplished via a targeting ligand, including any ligand described herein or known in the art. In some embodiments, the targeting ligand is a lipophilic moiety, e.g., a C16, and/or a carbohydrate moicty, e.g., a GalNAc ligand, or any other ligand that directs the RNAi agent to a site of interest. In certain embodiments, the ligand is not a cholesterol moiety. In certain embodiments, the RNAi agent does not include a targeting ligand.

[0662] The term “inhibiting,” as used herein, is used interchangeably with “reducing,” “silencing,” “downregulating,” “suppressing” and other similar terms, and includes any level of inhibition. In certain embodiments, a level of inhibition, e.g., for an RNAi agent of the instant disclosure, can be assessed in cell culture conditions, e.g., wherein cells in cell culture are transfected via Lipofectamine™-mediated transfection at a concentration in the vicinity of a cell of 10 nM or less, 1 nM or less, etc. Knockdown of a given RNAi agent can be determined via comparison of pre-treated levels in cell culture versus post-treated levels in cell culture, optionally also comparing against cells treated in parallel with a scrambled or other form of control RNAi agent. Knockdown in cell culture of, e.g., 50% or more, can thereby be identified as indicative of “inhibiting” or “reducing”, “downregulating” or “suppressing”, etc. having occurred. It is expressly contemplated that assessment of targeted mRNA or encoded protein levels (and therefore an extent of “inhibiting”, etc. caused by a RNAi agent of the disclosure) can also be assessed in in vivo systems for the RNAi agents of the instant disclosure, under properly controlled conditions as described in the art.

[0663] The phrase “inhibiting expression of a SGLT2 gene” or “inhibiting expression of SGLT2,” as used herein, includes inhibition of expression of any SGLT2 gene (such as, e.g., a mouse SGLT2 gene, a rat SGLT2 gene, a monkey SGLT2 gene, or a human SGLT2 gene) as well as variants or mutants of a SGLT2 gene that encode a SGLT2 protein. Thus, the SGLT2 gene may be a wild-type SGLT2 gene, a mutant SGLT2 gene , or a transgenic SGLT2 gene in the context of a genetically manipulated cell, group of cells, or organism.

[0664] “Inhibiting expression of a SGLT2 gene” includes any level of inhibition of a SGLT2 gene. e.g., at least partial suppression of the expression of a SGLT2 gene, such as an inhibition by at least 20%. In certain embodiments, inhibition is by at least 30%, at least 40%, at least 50%, at least about 60%, at least 70%, at least about 80%, at least 85%, at least 90%, at least 95%, at least 96%, at least 97%, at least 98%, or at least 99%; or to below the level of detection of the assay method. In certain method, inhibition is measured at a 10 nM concentration of the siRNA using the luciferase assay provided in Example 1.

[0665] The expression of a SGLT2 gene may be assessed based on the level of any variable associated with SGLT2 gene expression, e.g., SGLT2 mRNA level or SGLT2 protein level.

[0666] Inhibition may be assessed by a decrease in an absolute or relative level of one or more of these variables compared with a control level. The control level may be any type of control level that is utilized in the art, e.g., a pre-dose baseline level, or a level determined from a similar subject, cell, or sample that is untreated or treated with a control (such as, e.g., buffer only control or inactive agent control).

[0667] In some embodiments of the methods of the disclosure, expression of a SGLT2 gene is inhibited by at least 20%, 30%, 40%, 50%, 60%, 70%, 80%, 85%, 90%, or 95%, or to below the level of detection of the assay. In certain embodiments, the methods include a clinically relevant inhibition of expression of SGLT2, e.g. as demonstrated by a clinically relevant outcome after treatment of a subject with an agent to reduce the expression of a SGLT2 gene.

[0668] Inhibition of the expression of a SGLT2 gene may be manifested by a reduction of the amount of mRNA expressed by a first cell or group of cells (such cells may be present, for example, in a sample derived from a subject) in which a SGLT2 gene is transcribed and which has or have been treated (e.g., by contacting the cell or cells with a RNAi agent of the disclosure, or by administering a RNAi agent of the disclosure to a subject in which the cells are or were present) such that the expression of a SGLT2 gene is inhibited, as compared to a second cell or group of cells substantially identical to the first cell or group of cells but which has not or have not been so treated (control cell(s) not treated with a RNAi agent or not treated with a RNAi agent targeted to the genome of interest). The degree of inhibition may be expressed in terms of:

$$\frac{( mRNA in control cells ) - ( mRNA in treated cells )}{( mRNA in control cells )} 100 \%$$

[0669] In other embodiments, inhibition of the expression of a SGLT2 gene may be assessed in terms of a reduction of a parameter that is functionally linked to a SGLT2 gene expression, e.g., SGLT2 protein expression,. SGLT2 gene silencing may be determined in any cell expressing a SGLT2 gene, either endogenous or heterologous from an expression construct, and by any assay known in the art.

[0670] Inhibition of the expression of a SGLT2 protein may be manifested by a reduction in the level of the SGLT2 protein that is expressed by a cell or group of cells (e.g., the level of protein expressed in a sample derived from a subject). As explained above, for the assessment of genome suppression, the inhibiton of protein expression levels in a treated cell or group of cells may similarly be expressed as a percentage of the level of protein in a control cell or group of cells.

[0671] A control cell or group of cells that may be used to assess the inhibition of the expression of a SGLT2 gene includes a cell or group of cells that has not yet been contacted with an RNAi agent of the disclosure. For example, the control cell or group of cells may be derived from an individual subject (e.g., a human or animal subject) prior to treatment of the subject with an RNAi agent.

[0672] The level of SGLT2 mRNA that is expressed by a cell or group of cells may be determined using any method known in the art for assessing RNA expression. In one embodiment, the level of expression of SGLT2 in a sample is determined by detecting a transcribed polynucleotide, or portion thereof, e.g., mRNA of the SGLT2 gene. RNA may be extracted from cells using RNA extraction techniques including, for example, using acid phenol/guanidine isothiocyanate extraction (RNAzol B; Biogenesis), RNeasy™ RNA preparation kits (Qiagen®) or PAXgene (PreAnalytix, Switzerland). Typical assay formats utilizing ribonucleic acid hybridization include nuclear run-on assays, RT-PCR, RNase protection assays, northern blotting, in situ hybridization, and microarray analysis. Circulating SGLT2 mRNA may be detected using methods the described in WO2012/177906, the entire contents of which are hereby incorporated herein by reference.

[0673] In some embodiments, the level of expression of SGLT2 is determined using a nucleic acid probe. The term “probe”, as used herein, refers to any molecule that is capable of selectively binding to a specific SGLT2 nucleic acid or protein, or fragment thereof. Probes can be synthesized by one of skill in the art, or derived from appropriate biological preparations. Probes may be specifically designed to be labeled. Examples of molecules that can be utilized as probes include, but are not limited to, RNA, DNA, proteins, antibodies, and organic molecules.

[0674] Isolated mRNA can be used in hybridization or amplification assays that include, but are not limited to, Southern or northern analyses, polymerase chain reaction (PCR) analyses and probe arrays. One method for the determination of RNA levels involves contacting the isolated RNA with a nucleic acid molecule (probe) that can hybridize to SGLT2 RNA. In one embodiment, the RNA is immobilized on a solid surface and contacted with a probe, for example by running the isolated RNA on an agarose gel and transferring the RNA from the gel to a membrane, such as nitrocellulose. In an alternative embodiment, the probe(s) are immobilized on a solid surface and the RNA is contacted with the probe(s), for example, in an Affymetrix® gene chip array. A skilled artisan can readily adapt known RNA detection methods for use in determining the level of SGLT2 mRNA.

[0675] An alternative method for determining the level of expression of SGLT2 in a sample involves the process of nucleic acid amplification or reverse transcriptase (to prepare cDNA) of for example mRNA in the sample, e.g., by RT-PCR (the experimental embodiment set forth in Mullis, 1987, U.S. Pat. No. 4,683,202), ligase chain reaction (Barany (1991) Proc. Natl. Acad. Sci. USA 88:189-193), self sustained sequence replication (Guatelli et al. (1990) Proc. Natl. Acad. Sci. USA 87:1874-1878), transcriptional amplification system (Kwoh et al. (1989) Proc. Natl. Acad. Sci. USA 86:1173-1177), Q-Beta Replicase (Lizardi et al. (1988) Bio/Technology 6:1197), rolling circle replication (Lizardi et al., U.S. Pat. No. 5,854,033) or any other nucleic acid amplification method, followed by the detection of the amplified molecules using techniques well known to those of skill in the art. These detection schemes are especially useful for the detection of nucleic acid molecules if such molecules are present in very low numbers. In particular aspects of the disclosure, the level of expression of SGLT2 is determined by quantitative fluorogenic RT-PCR (i.e., the TaqMan™ System), by a Dual-Glo® Luciferase assay, or by other art-recognized method for measurement of SGLT2 expression or mRNA level.

[0676] The expression level of SGLT2 mRNA may be monitored using a membrane blot (such as used in hybridization analysis such as northern, Southern, dot, and the like), or microwells, sample tubes, gels, beads or fibers (or any solid support comprising bound nucleic acids). See U.S. Pat. Nos. 5,770,722, 5,874,219, 5,744,305, 5,677,195 and 5,445,934, which are incorporated herein by reference. The determination of SGLT2 expression level may also comprise using nucleic acid probes in solution.

[0677] In some embodiments, the level of RNA expression is assessed using branched DNA (bDNA) assays or real time PCR (qPCR). The use of this PCR method is described and exemplified in the Examples presented herein. Such methods can also be used for the detection of SGLT2 nucleic acids.

[0678] The level of SGLT2 protein expression may be determined using any method known in the art for the measurement of protein levels. Such methods include, for example, electrophoresis, capillary electrophoresis, high performance liquid chromatography (HPLC), thin layer chromatography (TLC), hyperdiffusion chromatography, fluid or gel precipitin reactions, absorption spectroscopy, a colorimetric assays, spectrophotometric assays, flow cytometry, immunodiffusion (single or double), immunoelectrophoresis, western blotting, radioimmunoassay (RIA), enzyme-linked immunosorbent assays (ELISAs), immunofluorescent assays, electrochemiluminescence assays, and the like. Such assays can also be used for the detection of proteins indicative of the presence or replication of SGLT2 proteins.

[0679] In some embodiments, the efficacy of the methods of the disclosure in the treatment of a SGLT2-related disease is assessed by a decrease in SGLT2 mRNA level (e.g, by assessment of a blood SGLT2 level, or otherwise).

[0680] In some embodiments, the efficacy of the methods of the disclosure in the treatment of a SGLT2-related disease is assessed by a decrease in SGLT2 mRNA level (e.g, by assessment of a liver or kidney sample for SGLT2 level, by biopsy, or otherwise).

[0681] In some embodiments of the methods of the disclosure, the RNAi agent is administered to a subject such that the RNAi agent is delivered to a specific site within the subject. The inhibition of expression of SGLT2 may be assessed using measurements of the level or change in the level of SGLT2 mRNA or SGLT2 protein in a sample derived from a specific site within the subject, e.g., liver or kidney cells. In certain embodiments, the methods include a clinically relevant inhibition of expression of SGLT2, e.g. as demonstrated by a clinically relevant outcome after treatment of a subject with an agent to reduce the expression of SGLT2.

[0682] As used herein, the terms detecting or determining a level of an analyte are understood to mean performing the steps to determine if a material, e.g., protein, RNA, is present. As used herein, methods of detecting or determining include detection or determination of an analyte level that is below the level of detection for the method used.

### VIII. Methods of Treating or Preventing SGLT2-Associated Diseases

[0683] The present disclosure also provides methods of using a RNAi agent of the disclosure or a composition containing a RNAi agent of the disclosure to reduce or inhibit SGLT2 expression in a cell. The methods include contacting the cell with a dsRNA of the disclosure and maintaining the cell for a time sufficient to obtain degradation of the mRNA transcripts of a SGLT2 gene, thereby inhibiting expression of the SGLT2 gene in the cell. Reduction in gene expression can be assessed by any methods known in the art. For example, a reduction in the expression of SGLT2 may be determined by determining the mRNA expression level of a SGLT2 gene using methods routine to one of ordinary skill in the art, e.g., northern blotting, qRT-PCR; by determining the protein level of a SGLT2 protein using methods routine to one of ordinary skill in the art, such as western blotting. immunological techniques.

[0684] In the methods of the disclosure the cell may be contacted in vitro or in vivo, i.e., the cell may be within a subject.

[0685] A cell suitable for treatment using the methods of the disclosure may be any cell that expresses a SGLT2 gene. A cell suitable for use in the methods of the disclosure may be a mammalian cell, e.g., a primate cell (such as a human cell or a non-human primate cell, e.g., a monkey cell or a chimpanzee cell), a non-primate cell (such as a rat cell, or a mouse cell. In one embodiment, the cell is a human cell, e.g., a human liver cell or a human kidney cell.

[0686] SGLT2 expression is inhibited in the cell by at least about 30, 40, 50, 55, 60, 65, 70, 75, 80, 85, 90, 95, 96, 97, 98, 99, or about 100%, i.e., to below the level of detection. In certain embodiments, SGLT2 expression is inhibited by at least 50%.

[0687] The in vivo methods of the disclosure may include administering to a subject a composition containing a RNAi agent, where the RNAi agent includes a nucleotide sequence that is complementary to at least a part of an RNA transcript of the SGLT2 gene of the subject to be treated. When the organism to be treated is a mammal such as a human, the composition can be administered by any means known in the art including, but not limited to oral, intraperitoneal, or parenteral routes, including intracranial (e.g., intraventricular, intraparenchymal, and intrathecal), intravenous, intramuscular, subcutaneous, transdermal, airway (aerosol), nasal, rectal, and topical (including buccal and sublingual) administration. In certain embodiments, the compositions are administered by intravenous infusion or injection. In certain embodiments, the compositions are administered by subcutaneous injection. In certain embodiments, the compositions are administered orally. In certain embodiments, the compositions are administered by pulmonary delivery, e.g., oral inhalation or intranasal delivery.

[0688] In some embodiments, the administration is via a depot injection. A depot injection may release the RNAi agent in a consistent way over a prolonged time period. Thus, a depot injection may reduce the frequency of dosing needed to obtain a desired effect, e.g., a desired inhibition of SGLT2, or a therapeutic or prophylactic effect. A depot injection may also provide more consistent serum concentrations. Depot injections may include subcutaneous injections or intramuscular injections. In certain embodiments, the depot injection is a subcutaneous injection.

[0689] In one embodiment, the double-stranded RNAi agent is administered by pulmonary sytem administration, e.g., intranasal administration or oral inhalative administration. Pulmonary system administration may be via a syringe, a dropper, atomization, or use of device, e.g., a passive breath driven or active power driven single/-multiple dose dry powder inhaler (DPI) device.

[0690] The mode of administration may be chosen based upon whether local or systemic treatment is desired and based upon the area to be treated. The route and site of administration may be chosen to enhance targeting.

[0691] In one aspect, the present disclosure also provides methods for inhibiting the expression of a SGLT2 gene in a mammal. The methods include administering to the mammal a composition comprising a dsRNA that targets a SGLT2 gene in a cell of the mammal and maintaining the mammal for a time sufficient to obtain degradation of the RNA transcript of the SGLT2 gene, thereby inhibiting expression of the SGLT2 gene in the cell. Reduction in genome expression can be assessed by any methods known it the art and by methods, e.g. qRT-PCR, described herein. Reduction in protein production can be assessed by any methods known it the art and by methods, e.g. ELISA, described herein.

[0692] The present disclosure further provides methods of treatment of a subject in need thereof. The treatment methods of the disclosure include administering an RNAi agent of the disclosure to a subject, e.g., a subject that would benefit from inhibition of SGLT2 expression, in a therapeutically effective amount of a RNAi agent targeting a SGLT2 gene or a pharmaceutical composition comprising a RNAi agent targeting a SGLT2 gene.

[0693] In addition, the present disclosure provides methods of preventing, treating or inhibiting the progression of a SGLT2-associated disease or disorder, e.g., gout or diabetes, e.g., type I or type II diabetes.

[0694] The methods include administering to the subject a therapeutically effective amount of any of the RNAi agent, e.g., dsRNA agents, or the pharmaceutical composition provided herein, thereby preventing, treating, or inhibiting the progression of the SGLT2-associated disease or disorder in the subject.

[0695] An RNAi agent of the disclosure may be administered as a “free RNAi agent.” A free RNAi agent is administered in the absence of a pharmaceutical composition. The naked RNAi agent may be in a suitable buffer solution. The buffer solution may comprise acetate, citrate, prolamine, carbonate, or phosphate, or any combination thereof. In one embodiment, the buffer solution is phosphate buffered saline (PBS). The pH and osmolarity of the buffer solution containing the RNAi agent can be adjusted such that it is suitable for administering to a subject. In certain embodiments, the free RNAi agent may be formulated in water or normal saline.

[0696] Alternatively, an RNAi agent of the disclosure may be administered as a pharmaceutical composition, such as a dsRNA liposomal formulation.

[0697] Subjects that would benefit from a reduction or inhibition of SGLT2 gene expression are those having a SGLT2-associated disease, subjects at risk of developing a SGLT2-associate discasc.

[0698] In some embodiments, the SGLT2-associated disease is gout. In other embodiments, the SGLT2-associated disease is a metabolic disease. In some embodiments, the SGLT2-associated disease is diabetes, e.g., type II diabetes.

[0699] Non-limiting examples of metabolic diseases include disorders of carbohydrates, e.g., diabetes (type I and type II diabetes), galactosemia, hereditary fructose intolerance, fructose 1,6-diphosphatase deficiency, glycogen storage disorders, congenital disorders of glycosylation, insulin resistance, insulin insufficiency, hyperinsulinemia, impaired glucose tolerance (IGT), abnormal glycogen metabolism; disorders of amino acid metabolism, e.g., maple syrup urine disease (MSUD), or homocystinuria; disorder of organic acid metabolism, e.g., methylmalonic aciduria, 3-methylglutaconic aciduria—Barth syndrome, glutaric aciduria or 2-hydroxyglutaric aciduria—D and L forms; disorders of faccy acid beta-oxidation, e.g., medium-chain acyl-CoA dehydrogenase deficiency (MCAD), long-chain 3-hydroxyacyl-CoA dehydrogenase deficiency (LCHAD), very-long-chain acyl-CoA dehydrogenase deficiency (VLCAD); disorders of lipid metabolism, e.g., GM1 Gangliosidosis, Tay-Sachs Disease, Sandhoff Disease, Fabry Disease, Gaucher Disease, Niemann-Pick Disease, Krabbe Disease, Mucolipidoses, or Mucopolysaccharidoses; mitochondrial disorders, e.g., mitochondrial cardiomyopathies; Leigh discase; mitochondrial encephalopathy, lactic acidosis, and stroke-like episodes (MELAS); myoclonic epilepsy with ragged-red fibers (MERRF); neuropathy, ataxia, and retinitis pigmentosa (NARP); Barth syndrome; or peroxisomal disorders, e.g., Zellweger Syndrome (cerebrohepatorenal syndrome), X-Linked Adrenoleukodystrophy or Refsum Discasc.

[0700] The disclosure further provides methods for the use of a RNAi agent or a pharmaceutical composition thereof, e.g., for treating a subject that would benefit from reduction or inhibition of SGLT2 expression, e.g., a subject having a SGLT2-associated disorder, in combination with other pharmaceuticals or other therapeutic methods, e.g., with known pharmaceuticals or known therapeutic methods, such as, for example, those which are currently employed for treating these disorders. For example, in certain embodiments, an RNAi agent targeting SGLT2 is administered in combination with, e.g., an agent useful in treating a SGLT2-associated disorder as described elsewhere herein or as otherwise known in the art. For example, additional agents and treatments suitable for treating a subject that would benefit from reducton in SGLT2 expression, e.g., a subject having a SGLT2-associated disorder, may include agents currently used to treat symptoms of SGLT2-associated disorder.

[0701] Examples of the additional therapeutic agents which can be used with an RNAi agent of the invention include, but are not limited to, diabetes mellitus-treating agents, diabetic complication-treating agents, cardiovascular diseases-treating agents, anti-hyperlipemic agents, hypotensive or antihypertensive agents, anti-obesity agents, nonalcoholic steatohepatitis (NASH)-treating agents, chemotherapeutic agents, immunotherapeutic agents, immunosuppressive agents, nonsteroidal anti-inflammatory drugs (NSAIDs), colchicine, corticosteroids, and the like. Such combination therapies may advantageously utilize lower dosages of the administered therapeutic agents, thus avoiding possible toxicities or complications associated with the various monotherapies.

[0702] Examples of agents for treating diabetes mellitus include insulin formulations (e.g., animal insulin formulations extracted from a pancreas of a cattle or a swine; a human insulin formulation synthesized by a gene engineering technology using microorganisms or methods), insulin sensitivity enhancing agents, pharmaceutically acceptable salts, hydrates, or solvates thereof (e.g., pioglitazone, troglitazone, rosiglitazone, netoglitazone, balaglitazone, rivoglitazone, tesaglitazar, farglitazar, CLX-0921, R-483, NIP-221, NIP-223, DRF-2189, GW-7282TAK-559, T-131, RG-12525, LY-510929, LY-519818, BMS-298585, DRF-2725, GW-1536, GI-262570, KRP-297, TZD18 (Merck), DRF-2655, and the like), alpha-glycosidase inhibitors (e.g., voglibose, acarbose, miglitol, emiglitate and the like), biguanides (e.g., phenformin, metformin, buformin and the like) or sulfonylurcas (e.g., tolbutamide, glibenclamide, gliclazide, chlorpropamide, tolazamide, acetohexamide, glyclopyramide, glimepiride and the like) as well as other insulin secretion-promoting agents (e.g., repaglinide, senaglinide, nateglinide, mitiglinide, GLP-1 and the like), amyrin agonist (e.g., pramlintide and the like), phosphotyrosin phosphatase inhibitor (e.g., vanadic acid and the like) and the like.

[0703] Examples of agents for treating diabetic complications include, but are not limited to, aldose reductase inhibitors (e.g., tolrestat, epalrestat, zenarestat, zopolrestat, minalrestat, fidareatat, SK-860, CT-112 and the like), neurotrophic factors (e.g., NGF, NT-3, BDNF and the like), PKC inhibitors (e.g., LY-333531 and the like), advanced glycation end-product (AGE) inhibitors (e.g., ALT946, pimagedine, pyradoxamine, phenacylthiazolium bromide (ALT766) and the like), active oxygen quenching agents (e.g., thioctic acid or derivative thereof, a bioflavonoid including flavones, isoflavones, flavonones, procyanidins, anthocyanidins, pycnogenol, lutein, lycopene, vitamins E, coenzymes Q, and the like), cerebrovascular dilating agents (e.g., tiapride, mexiletene and the like).

[0704] Anti-hyperlipemic agents include, for example, statin-based compounds which are cholesterol synthesis inhibitors (e.g., pravastatin, simvastatin, lovastatin, atorvastatin, fluvastatin, rosuvastatin and the like), squalene synthetase inhibitors or fibrate compounds having a triglyceride-lowering effect (e.g., fenofibrate, gemfibrozil, bezafibrate, clofibrate, sinfibrate, clinofibrate and the like), niacin, PCSK9 inhibitors, triglyceride lowing agents or cholesterol sequesting agents.

[0705] Hypotensive agents include, for example, angiotensin converting enzyme inhibitors (e.g., captopril, enalapril, delapril, benazepril, cilazapril, enalapril, enalaprilat, fosinopril, lisinopril, moexipril, perindopril, quinapril, ramipril, trandolapril and the like) or angiotensin II antagonists (e.g., losartan, candesartan cilexetil, olmesartan medoxomil, eprosartan, valsartan, telmisartan, irbesartan, tasosartan, pomisartan, ripisartan forasartan, and the like) or calcium channel blockers (e.g., amlodipine) or aspirin.

[0706] Nonalcoholic steatohepatitis (NASH)-treating agents include, for example, ursodiol, pioglitazone, orlistat, betaine, rosiglitazone.

[0707] Anti-obesity agents include, for example, central antiobesity agents (e.g., dexfenfluramine, fenfluramine, phentermine, sibutramine, amfepramone, dexamphetamine, mazindol, phenylpropanolamine, clobenzorex and the like), gastrointestinal lipase inhibitors (e.g., orlistat and the like), beta 3-adrenoceptor agonists (e.g., CL-316243, SR-58611-A, UL-TG-307, SB-226552, AJ-9677, BMS-196085 and the like), peptide-based appetite-suppressing agents (e.g., leptin, CNTF and the like), cholecystokinin agonists (e.g., lintitript, FPL-15849 and the like) and the like.

[0708] Chemotherapeutic agents include, for example, alkylating agents (e.g., cyclophosphamide, iphosphamide and the like), metabolism antagonists (e.g., methotrexate, 5-fluorouracil and the like), anticancer antibiotics (e.g., mitomycin, adriamycin and the like), vegetable-derived anticancer agents (e.g., vincristine, vindesine, taxol and the like), cisplatin, carboplatin, etoposide and the like. Among these substances, 5-fluorouracil derivatives such as furtulon and neofurtulon are preferred.

[0709] Immunotherapeutic agents include, for example, microorganisms or bacterial components (e.g., muramyl dipeptide derivative, picibanil and the like), polysaccharides having immune potentiating activity (e.g., lentinan, sizofilan, krestin and the like), cytokines obtained by a gene engineering technology (e.g., interferon, interleukin (IL) and the like), colony stimulating factors (e.g., granulocyte colony stimulating factor, erythropoctin and the like) and the like. In some embodiments, the agents are IL-1, IL-2, IL-12 and the like.

[0710] Immunosuppressive agents include, for example, calcineurin inhibitor/immunophilin modulators such as cyclosporine (Sandimmune, Gengraf, Neoral), tacrolimus (Prograf, FK506), ASM 981, sirolimus (RAPA, rapamycin, Rapamune), or its derivative SDZ-RAD, glucocorticoids (prednisone, prednisolone, methylprednisolone, dexamethasone and the like), purine synthesis inhibitors (mycophenolate mofetil, MMF, CellCept(R), azathioprine, cyclophosphamide), interleukin antagonists (basiliximab, daclizumab, deoxyspergualin), lymphocyte-depleting agents such as antithymocyte globulin (Thymoglobulin, Lymphoglobuline), anti-CD3 antibody (OKT3), and the like.

[0711] In addition, agents whose cachexia improving effect has been established in an animal model or at a clinical stage, such as cyclooxygenase inhibitors (e.g., indomethacin and the like), progesterone derivatives (e.g., megestrol acetate), glucosteroid (e.g., dexamethasone and the like), metoclopramide-based agents, tetrahydrocannabinol-based agents, lipid metabolism improving agents (e.g., cicosapentanoic acid and the like), growth hormones, IGF-1, antibodies against TNF-α, LIF, IL-6 and oncostatin M may also be employed concomitantly with an RNAi agent according to the present invention. Additional therapeutic agents for use in the treatment of diseases or conditions related to metabolic disorders and/or impaired neurological signaling would be apparent to the skilled artisan and are within the scope of this disclosure.

[0712] In some embodiments, second agents suitable for administration as a combination therapy in conjunction with the RNAi agents described herein are diabetes mellitus-treating agents, diabetic complication-treating agents, cardiovascular diseases-treating agents, anti-hyperlipemic agents, hypotensive or antihypertensive agents, anti-obesity agents, nonalcoholic steatohepatitis (NASH)-treating agents, chemotherapeutic agents, immunotherapeutic agents, immunosuppressive agents, nonsteroidal anti-inflammatory drugs (NSAIDs), colchicine, or corticosteroids, and a combination of any of the foregoing.

[0713] The RNAi agent and additional therapeutic agents may be administered at the same time or in the same combination, or the additional therapeutic agent can be administered as part of a separate composition or at separate times or by another method known in the art or described herein.

[0714] In one embodiment, the method includes administering a composition featured herein such that expression of the target SGLT2 gene is decreased, for at least one month. In some embodiments, expression is decreased for at least 2 months, 3 months, or 6 months.

[0715] In certain embodiments, administration includes a loading dose administered at a higher frequency, e.g., once per day, twice per week, once per week, for an initial dosing period, e.g., 2-4 doses.

[0716] In some embodiments, the RNAi agents useful for the methods and compositions featured herein specifically target RNAs (primary or processed) of the target SGLT2 gene. Compositions and methods for inhibiting the expression of these genes using RNAi agents can be prepared and performed as described herein.

[0717] Administration of the dsRNA according to the methods of the disclosure may result in a reduction of the severity, signs, symptoms, or markers of such diseases or disorders in a patient with a SGLT2-associated disorder. In some embodiments, administration of the dsRNA results in a reduction in blood glucose or uric acid level in a subject with a SGLT2-associated disorder. In other embodiments, administration of the dsRNA results in a reduction in blood lipid level in a subject with a SGLT2-associated disorder. By “reduction” in this context is meant a statistically significant or clinically significant decrease in such level. The reduction can be, for example, at least 5%, 10%. 15%, 20%, 25%, 30%, 35%, 40%, 45%, 50%, 55%, 60%, 65%, 70%, 75%, 80%, 85%, 90%, 95%, or about 100%.

[0718] Efficacy of treatment or prevention of disease can be assessed, for example by measuring disease progression, disease remission, symptom severity, reduction in pain, quality of life, dose of a medication required to sustain a treatment effect, level of a disease marker or any other measurable parameter appropriate for a given disease being treated or targeted for prevention. It is well within the ability of one skilled in the art to monitor efficacy of treatment or prevention by measuring any one of such parameters, or any combination of parameters. It is well within the ability of one skilled in the art to monitor efficacy of treatment or prevention by measuring any one of such parameters, or any combination of parameters. In connection with the administration of a RNAi agent targeting SGLT2 or pharmaceutical composition thereof, “effective against” a SGLT2-associated disorder indicates that administration in a clinically appropriate manner results in a beneficial effect for at least a statistically significant fraction of patients, such as an improvement of symptoms, a cure, a reduction in disease, extension of life, improvement in quality of life, or other effect generally recognized as positive by medical doctors familiar with treating SGLT2-associated disorders and the related causes.

[0719] A treatment or preventive effect is evident when there is a statistically significant improvement in one or more parameters of disease status, or by a failure to worsen or to develop symptoms where they would otherwise be anticipated. As an example, a favorable change of at least 10% in a measurable parameter of disease, and at least 20%, 30%, 40%, 50%, or more can be indicative of effective treatment. Efficacy for a given RNAi agent drug or formulation of that drug can also be judged using an experimental animal model for the given disease as known in the art. When using an experimental animal model, efficacy of treatment is evidenced when a statistically significant reduction in a marker or symptom is observed.

[0720] Alternatively, the efficacy can be measured by a reduction in the severity of disease as determined by one skilled in the art of diagnosis based on a clinically accepted disease severity grading scale. Any positive change resulting in e.g., lessening of severity of disease measured using the appropriate scale, represents adequate treatment using a RNAi agent or RNAi agent formulation as described herein.

[0721] Subjects can be administered a therapeutic amount of dsRNA, such as about 0.01 mg/kg to about 200 mg/kg.

[0722] The RNAi agent can be administered over a period of time, on a regular basis. In certain embodiments, after an initial treatment regimen, the treatments can be administered on a less frequent basis. Administration of the RNAi agent can reduce SGLT2 levels, e.g., in a cell, tissue, blood sample or other compartment of the patient by at least 20%, 30%, 40%, 50%, 55%, 60%, 65%, 70,% 75%, 80%, 85%, 90%, 95%, 96%, 97%, 98%, or at least about 99% or more. In one embodiment, administration of the RNAi agent can reduce SGLT2 levels, e.g., in a cell, tissue, blood sample, or other compartment of the patient by at least 50%.

[0723] Before administration of a full dose of the RNAi agent, patients can be administered a smaller dose, such as a 5% infusion reaction, and monitored for adverse effects, such as an allergic reaction. In another example, the patient can be monitored for unwanted immunostimulatory effects, such as increased cytokine (e.g., TNF-alpha or INF-alpha) levels.

[0724] Alternatively, the RNAi agent can be administered by oral administration, pulmonary admistration, intravenously, i.e., by intravenous injrection, or subcutaneously, i.e., by subcutaneous injection. One or more injections may be used to deliver the desired, e.g., monthly dose of RNAi agent to a subject. The injections may be repeated over a period of time. The administration may be repeated on a regular basis. In certain embodiments, after an initial treatment regimen, the treatments can be administered on a less frequent basis. A repeat-dose regimine may include administration of a therapeutic amount of RNAi agent on a regular basis, such as monthly or extending to once a quarter, twice per year, once per year. In certain embodiments, the RNAi agent is administered about once per month to about once per quarter (i.e., about once every three months).

### IX. Kits

[0725] In certain aspects, the instant disclosure provides kits that include a suitable container containing a pharmaceutical formulation of a siRNA compound, e.g., a double-stranded siRNA compound, or siRNA compound, (e.g., a precursor, e.g., a larger siRNA compound which can be processed into a siRNA compound, or a DNA which encodes an siRNA compound, e.g., a double-stranded siRNA compound, or siRNA compound, or precursor thereof). In certain embodiments the individual components of the pharmaceutical formulation may be provided in one container. Alternatively, it may be desirable to provide the components of the pharmaceutical formulation separately in two or more containers, e.g., one container for a siRNA compound preparation, and at least another for a carrier compound. The kit may be packaged in a number of different configurations such as one or more containers in a single box. The different components can be combined, e.g., according to instructions provided with the kit. The components can be combined according to a method described herein, e.g., to prepare and administer a pharmaceutical composition. The kit can also include a delivery device.

[0726] Unless otherwise defined, all technical and scientific terms used herein have the same meaning as commonly understood by one of ordinary skill in the art to which this invention belongs. Although methods and materials similar or equivalent to those described herein can be used in the practice or testing of the RNAi agents and methods featured in the invention, suitable methods and materials are described below. All publications, patent applications, patents, and other references mentioned herein are incorporated by reference in their entirety. In case of conflict, the present specification, including definitions, will control. In addition, the materials, methods, and examples are illustrative only and not intended to be limiting.

[0727] An informal Sequence Listing is filed herewith and forms part of the specification as filed.

[0728] This invention is further illustrated by the following examples which should not be construed as limiting. The entire contents of all references, patents and published patent applications cited throughout this application, as well as the Figures and the Sequence Listing, are hereby incorporated herein by reference.

### EXAMPLES

### Example 1. iRNA Synthesis

### Source of Reagents

[0729] Where the source of a reagent is not specifically given herein, such reagent can be obtained from any supplier of reagents for molecular biology at a quality/purity standard for application in molecular biology.

siRNA Design

[0730] The selection of siRNA designs targeting human sodium-glucose cotransporter 2 (SGLT2) gene (human NCBI refseqID: NM_003041.4; NCBI GeneID: 6524) were designed using custo R and Python scripts. The human NM_003041.4 REFSEQ mRNA has a length of 2267 bases.

[0731] A detailed list of a set of the unmodified siRNA sense and antisense strand sequences targeting SGLT2 is shown in Table 2.

[0732] A detailed list of a set of the modified siRNA sense and antisense strand sequences targeting SGLT2 is shown in Table 3.

[0733] It is to be understood that, throughout the application, a duplex name without a decimal is equivalent to a duplex name with a decimal which merely references the batch number of the duplex. For example, AD-1230521 is equivalent to AD-1230521.

siRNA Synthesis

[0734] siRNAs were synthesized and annealed using routine methods known in the art. Briefly. siRNA sequences were synthesized on a 1 umol scale using a Mermade 192 synthesizer (BioAutomation) with phosphoramidite chemistry on solid supports. The solid support was controlled pore glass (500-1000 Å) loaded with a custom GalNAc ligand (3′-GalNAc conjugates), universal solid support (AM Chemicals), or the first nucleotide of interest. Ancillary synthesis reagents and standard 2-cyanoethyl phosphoramidite monomers (2′-deoxy-2′-fluoro, 2′-O-methyl, RNA, DNA) were obtained from Thermo-Fisher (Milwaukee, WI), Hongene (China), or Chemgenes (Wilmington, MA, USA). Additional phosphoramidite monomers were procured from commercial suppliers, prepared in-house, or procured using custom synthesis from various CMOs. Phosphoramidites were prepared at a concentration of 100 mM in either acetonitrile or 9:1 acetonitrile:DMF and were coupled using 5-Ethylthio-1H-tetrazole (ETT, 0.25 M in acetonitrile) with a reaction time of 400 s. Phosphorothioate linkages were generated using a 100 mM solution of 3-((Dimethylamino-methylidene) amino)-3H-1,2,4-dithiazole-3-thione (DDTT, obtained from Chemgenes (Wilmington, MA, USA)) in anhydrous acetonitrile/pyridine (9:1 v/v). Oxidation time was 5 minutes. All sequences were synthesized with final removal of the DMT group (“DMT-Off”).

[0735] Upon completion of the solid phase synthesis, solid-supported oligoribonucleotides were treated with 300 μL of Methylamine (40% aqueous) at room temperature in 96 well plates for approximately 2 hours to afford cleavage from the solid support and subsequent removal of all additional base-labile protecting groups. For sequences containing any natural ribonucleotide linkages (2′-OH) protected with a tert-butyl dimethyl silyl (TBDMS) group, a second deprotection step was performed using TEA.3HF (triethylamine trihydrofluoride). To each oligonucleotide solution in aqueous methylamine was added 200 μL of dimethyl sulfoxide (DMSO) and 300 μL TEA.3HF and the solution was incubated for approximately 30 mins at 60° C. After incubation, the plate was allowed to come to room temperature and crude oligonucleotides were precipitated by the addition of 1 mL of 9:1 acetontrile:ethanol or 1:1 ethanol:isopropanol. The plates were then centrifuged at 4° C. for 45 mins and the supernatant carefully decanted with the aid of a multichannel pipette. The oligonucleotide pellet was resuspended in 20 mM NaOAc and subsequently desalted using a HiTrap size exclusion column (5 mL, GE Healthcare) on an Agilent LC system equipped with an autosampler, UV detector, conductivity meter, and fraction collector. Desalted samples were collected in 96 well plates and then analyzed by LC-MS and UV spectrometry to confirm identity and quantify the amount of material, respectively.

[0736] Duplexing of single strands was performed on a Tecan liquid handling robot. Sense and antisense single strands were combined in an equimolar ratio to a final concentration of 10 μM in 1× PBS in 96 well plates, the plate sealed, incubated at 100 ° C. for 10 minutes, and subsequently allowed to return slowly to room temperature over a period of 2-3 hours. The concentration and identity of each duplex was confirmed and then subsequently utilized for in vitro screening assays.

### Example 2. In vitro Screening of siRNA Duplexes

[0737] Cell culture and transfections

[0738] Hep3b cells (ATCC, Manassas, VA) were grown to near confluence at 37° C. in an atmosphere of 5% CO₂ in Eagle's Minimum Essential Medium (Gibco) supplemented with 10% FBS (ATCC) before being released from the plate by trypsinization. Transfection was carried out by adding 7.5 μL of Opti-MEM plus 0.1 μL of RNAiMAX per well (Invitrogen, Carlsbad CA. cat #13778-150) to 2.5 μL of each siRNA duplex to an individual well in a 384-well plate. The mixtures were then incubated at room temperature for 15 minutes. Forty uL of complete growth media containing ˜1.5×10⁴ cells were then added to the siRNA mixture. Cells were incubated for 24 hours prior to RNA purification. Single dose experiments were performed at 10 nM. The assays were performed as quadruplicates.

### In Vitro Dual-Luciferase and Endogenous Screening Assays

[0739] Hepa1-6 cells cells were transfected by adding 50 μL of siRNA duplexes and 75 ng of a plasmid, comprising full-length human SGLT2 target sequence, per well along with 100 μL of Opti-MEM plus 0.5 μL of Lipofectamine 2000 per well (Invitrogen, Carlsbad CA. cat #13778-150) and then incubated at room temperature for 15 minutes. The mixture was then added to the cells which are re-suspended in 35 μL of fresh complete media. The transfected cells were incubated at 37° C. in an atmosphere of 5% CO₂. Single-dose experiments were performed at 10 nM or 50 nM.

[0740] Twenty-four hours after the siRNAs and psiCHECK2 plasmid are transfected; Firefly (transfection control) and Renilla (fused to full-length fSGLT2 target sequence) luciferase were measured. First, media was removed from cells. Then Firefly luciferase activity was measured by adding 75 μL of Dual-Glo® Luciferase Reagent equal to the culture medium volume to each well and mix. The mixture was incubated at room temperature for 30 minutes before luminescense (500 nm) was measured on a Spectramax (Molecular Devices) to detect the Firefly luciferase signal. Renilla luciferase activity was measured by adding 75 μL of room temperature of Dual-Glo® Stop & Glo® Reagent to each well and the plates were incubated for 10-15 minutes before luminescence was again measured to determine the Renilla luciferase signal. The Dual-Glo® Stop & Glo® Reagent quenches the firefly luciferase signal and sustained luminescence for the Renilla luciferase reaction. siRNA activity was determined by normalizing the Renilla (MUC5B) signal to the Firefly (control) signal within each well. The magnitude of siRNA activity was then assessed relative to cells that were transfected with the same vector but were not treated with siRNA or were treated with a non-targeting siRNA. All transfections were done with n=4.

Total RNA Isolation Using DYNABEADS mRNA Isolation Kit

[0741] Total RNA isolation was performed using DYNABEADS. Briefly, cells were lysed in 10 μl of Lysis/Binding Buffer containing 3 μL of beads per well and mixed for 10 minutes on an electrostatic shaker. The washing steps were automated on a Biotek EL^{406,} using a magnetic plate support. Beads were washed (in 3μL) once in Buffer A, once in Buffer B, and twice in Buffer E, with aspiration steps in between. Following a final aspiration, complete 12 μL RT mixture was added to each well, as described below.

### CDNA Synthesis

[0742] For cDNA synthesis, a master mix of 1.5 μl 10× Buffer, 0.6 μl 10× dNTPs, 1.5 μl Random primers, 0.75 μl Reverse Transcriptase, 0.75 μl RNase inhibitor and 9.9 μl of H₂O per reaction were added per well. Plates were sealed, agitated for 10 minutes on an electrostatic shaker, and then incubated at 37 degrees C. for 2 hours. Following this, the plates were agitated at 80 degrees C. for 8 minutes.

### Real Time PCR

[0743] Two microlitre (μl) of cDNA were added to a master mix containing 0.5 μl of human GAPDH TaqMan Probe (4326317E), 0.5 μl human SGLT2, 2 μl nuclease-free water and 5 μl Lightcycler 480 probe master mix (Roche Cat #04887301001) per well in a 384 well plates (Roche cat #04887301001). Real time PCR was done in a LightCycler480 Real Time PCR system (Roche).

[0744] To calculate relative fold change, data were analyzed using the ΔΔCt method and normalized to assays performed with cells transfected with 10nM AD-1955, or mock transfected cells. IC₅₀s were calculated using a 4 parameter fit model using XLFit and normalized to cells transfected with AD-1955 or mock-transfected. The sense and antisense sequences of AD-1955 are: sense: cuuAcGcuGAGuAcuucGAdTsdT (SEQ ID NO:15) and antisense UCGAAGuACUcAGCGuAAGdTsdT (SEQ ID NO:16).

[0745] The results of the dual-luciferase assays of the agents listed in Tables 2 and 3 are provided in Table 4.

Table 1. Abbreviations of nucleotide monomers used in nucleic acid sequence representation. It will be understood that these monomers, when present in an oligonucleotide, are mutually linked by 5′-3′-phosphodiester bonds; and it is understood that when the nucleotide contains a 2′-fluoro modification, then the fluoro replaces the hydroxy at that position in the parent nucleotide (i.e., it is a 2′-deoxy-2′-fluoronucleotide).

| Abbreviation | Nucleotide(s) |
|---|---|
| A | Adenosine-3′-phosphate |
| Ab | beta-L-adenosine-3′-phosphate |
| Abs | beta-L-adenosine-3′-phosphorothioate |
| Af | 2′-fluoroadenosine-3′-phosphate |
| Afs | 2′-fluoroadenosine-3′-phosphorothioate |
| As | adenosine-3′-phosphorothioate |
| C | cytidine-3′-phosphate |
| Cb | beta-L-cytidine-3′-phosphate |
| Cbs | beta-L-cytidine-3′-phosphorothioate |
| Cf | 2′-fluorocytidine-3′-phosphate |
| Cfs | 2′-fluorocytidine-3′-phosphorothioate |
| Cs | cytidine-3′-phosphorothioate |
| G | guanosine-3′-phosphate |
| Gb | beta-L-guanosine-3′-phosphate |
| Gbs | beta-L-guanosine-3′-phosphorothioate |
| Gf | 2′-fluoroguanosine-3′-phosphate |
| Gfs | 2′-fluoroguanosine-3′-phosphorothioate |
| Gs | guanosine-3′-phosphorothioate |
| T | 5′-methyluridine-3′-phosphate |
| Tf | 2′-fluoro-5-methyluridine-3′-phosphate |
| Tfs | 2′-fluoro-5-methyluridine-3′-phosphorothioate |
| Ts | 5-methyluridine-3′-phosphorothioate |
| U | Uridine-3′-phosphate |
| Uf | 2′-fluorouridine-3′-phosphate |
| Ufs | 2′-fluorouridine-3′-phosphorothioate |
| Us | uridine-3′-phosphorothioate |
| N | any nucleotide, modified or unmodified |
| a | 2′-O-methyladenosine-3′-phosphate |
| as | 2′-O-methyladenosine-3′-phosphorothioate |
| c | 2′-O-methylcytidine-3′-phosphate |
| cs | 2′-O-methylcytidine-3′-phosphorothioate |
| g | 2′-O-methylguanosine-3′-phosphate |
| gs | 2′-O-methylguanosine-3′-phosphorothioate |
| t | 2′-O-methyl-5-methyluridine-3′-phosphate |
| ts | 2′-O-methyl-5-methyluridine-3′-phosphorothioate |
| u | 2′-O-methyluridine-3′-phosphate |
| us | 2′-O-methyluridine-3′-phosphorothioate |
| s | phosphorothioate linkage |
| L10 | N-(cholesterylcarboxamidocaproyl)-4-hydroxyprolinol (Hyp-C6-Chol) |
| L96 | N-[tris(GalNAc-alkyl)-amidodecanoyl)]-4-hydroxyprolinol |
| | (Hyp-(GalNAc-alkyl)3) |
| | [chemical structure] |
| Y34 | 2-hydroxymethyl-tetrahydrofurane-4-methoxy-3-phosphate (abasic 2′-OMe |
| | furanose) |
| | [chemical structure] |
| Y44 | inverted abasic DNA (2-hydroxymethyl-tetrahydrofurane-5-phosphate) |
| | [chemical structure] |
| L10 | N-(cholesterylcarboxamidocaproyl)-4-hydroxyprolinol (Hyp-C6-Chol) |
| | [chemical structure] |
| (Agn) | Adenosine-glycol nucleic acid (GNA) S-Isomer |
| (Cgn) | Cytidine-glycol nucleic acid (GNA) S-Isomer |
| (Ggn) | Guanosine-glycol nucleic acid (GNA) S-Isomer |
| (Tgn) | Thymidine-glycol nucleic acid (GNA) S-Isomer |
| P | Phosphate |
| VP | Vinyl-phosphonate |
| dA | 2′-deoxyadenosine-3′-phosphate |
| dAs | 2′-deoxyadenosine-3′-phosphorothioate |
| dC | 2′-deoxycytidine-3′-phosphate |
| dCs | 2′-deoxycytidine-3′-phosphorothioate |
| dG | 2′-deoxyguanosine-3′-phosphate |
| dGs | 2′-deoxyguanosine-3′-phosphorothioate |
| dT | 2′-deoxythymidine-3′-phosphate |
| dTs | 2′-deoxythymidine-3′-phosphorothioate |
| dU | 2′-deoxyuridine |
| dUs | 2′-deoxyuridine-3′-phosphorothioate |
| (C2p) | cytidine-2′-phosphate |
| (G2p) | guanosine-2′-phosphate |
| (U2p) | uridine-2′-phosphate |
| (A2p) | adenosine-2′-phosphate |
| (Chd) | 2′-O-hexadecyl-cytidine-3′-phosphate |
| (Ahd) | 2′-O-hexadecyl-adenosine-3′-phosphate |
| (Ghd) | 2′-O-hexadecyl-guanosine-3′-phosphate |
| (Uhd) | 2′-O-hexadecyl-uridine-3′-phosphate |

TABLE 2
Unmodified Sense and Antisense Strand SGLT2 dsRNA Sequences

| | | SEQ | | SEQ | Start site | |
|---|---|---|---|---|---|---|
| | Sense Sequence | ID | Antisense Sequence | ID | in NM_ | End site in |
| Duplex Name | 5′ to 3′ | NO: | 5′ to 3′ | NO: | 003041.4 | NM_003041.4 |
| AD-1590440 | GAGAAUGGAGGAGCACACAGA | 17 | UCUGUGUGCUCCUCCAUUCUCCC | 152 | 9 | 31 |
| AD-1590449 | GGAGCACACAGAGGCAGGCUA | 18 | UAGCCUGCCUCUGUGUGCUCCUC | 153 | 18 | 40 |
| AD-1590462 | GCAGGCUCGGCACCAGAGAUA | 19 | UAUCUCUGGUGCCGAGCCUGCCU | 154 | 31 | 53 |
| AD-1590468 | CCCAGAAGGCCCUGAUUGACA | 20 | UGUCAAUCAGGGCCUUCUGGGCC | 155 | 56 | 78 |
| AD-1590477 | CCCUGAUUGACAAUCCUGCUA | 21 | UAGCAGGAUUGUCAAUCAGGGCC | 156 | 65 | 87 |
| AD-1590486 | ACAAUCCUGCUGACAUCCUAA | 22 | UUAGGAUGUCAGCAGGAUUGUCA | 157 | 74 | 96 |
| AD-1590496 | UGACAUCCUAGUCAUUGCUGA | 23 | UCAGCAAUGACUAGGAUGUCAGC | 158 | 84 | 106 |
| AD-1590506 | GUCAUUGCUGCAUAUUUCCUA | 24 | UAGGAAAUAUGCAGCAAUGACUA | 159 | 94 | 116 |
| AD-1590515 | GCAUAUUUCCUGCUGGUCAUA | 25 | UAUGACCAGCAGGAAAUAUGCAG | 160 | 103 | 125 |
| AD-1590524 | CUGCUGGUCAUUGGCGUUGGA | 26 | UCCAACGCCAAUGACCAGCAGGA | 161 | 112 | 134 |
| AD-1590535 | UGGCGUUGGCUUGUGGUCCAA | 27 | UUGGACCACAAGCCAACGCCAAU | 162 | 123 | 145 |
| AD-1590550 | GUCCAUGUGCAGAACCAACAA | 28 | UUGUUGGUUCUGCACAUGGACCA | 163 | 138 | 160 |
| AD-1590559 | CAGAACCAACAGAGGCACUGA | 29 | UCAGUGCCUCUGUUGGUUCUGCA | 164 | 147 | 169 |
| AD-1590569 | AGAGGCACUGUGGGCGGCUAA | 30 | UUAGCCGCCCACAGUGCCUCUGU | 165 | 157 | 179 |
| AD-1590579 | UGGGCGGCUACUUCCUGGCAA | 31 | UUGCCAGGAAGUAGCCGCCCACA | 166 | 167 | 189 |
| AD-1590589 | CUUCCUGGCAGGACGCAGCAA | 32 | UUGCUGCGUCCUGCCAGGAAGUA | 167 | 177 | 199 |
| AD-1590598 | AGGACGCAGCAUGGUGUGGUA | 33 | UACCACACCAUGCUGCGUCCUGC | 168 | 186 | 208 |
| AD-1590611 | CCUCUCUCUUCGCCAGCAACA | 34 | UGUUGCUGGCGAAGAGAGAGGCC | 169 | 218 | 240 |
| AD-1590620 | UCGCCAGCAACAUCGGCAGUA | 35 | UACUGCCGAUGUUGCUGGCGAAG | 170 | 227 | 249 |
| AD-1590630 | CAUCGGCAGUGGCCACUUUGA | 36 | UCAAAGUGGCCACUGCCGAUGUU | 171 | 237 | 259 |
| AD-1590639 | UGGCCACUUUGUGGGCCUGGA | 37 | UCCAGGCCCACAAAGUGGCCACU | 172 | 246 | 268 |
| AD-1590666 | CUGCAAGUGGCUUGGCUGUUA | 38 | UAACAGCCAAGCCACUUGCAGCG | 173 | 278 | 300 |
| AD-1590677 | UUGGCUGUUGCUGGAUUCGAA | 39 | UUCGAAUCCAGCAACAGCCAAGC | 174 | 289 | 311 |
| AD-1590694 | CGAGUGGAAUGCGCUCUUCGA | 40 | UCGAAGAGCGCAUUCCACUCGAA | 175 | 306 | 328 |
| AD-1590704 | GCGCUCUUCGUGGUGCUGCUA | 41 | UAGCAGCACCACGAAGAGCGCAU | 176 | 316 | 338 |
| AD-1590713 | GUGGUGCUGCUACUGGGCUGA | 42 | UCAGCCCAGUAGCAGCACCACGA | 177 | 325 | 347 |
| AD-1590722 | CUACUGGGCUGGCUGUUUGCA | 43 | UGCAAACAGCCAGCCCAGUAGCA | 178 | 334 | 356 |
| AD-1590731 | UGGCUGUUUGCACCCGUGUAA | 44 | UUACACGGGUGCAAACAGCCAGC | 179 | 343 | 365 |
| AD-1590741 | CACCCGUGUACCUGACAGCGA | 45 | UCGCUGUCAGGUACACGGGUGCA | 180 | 353 | 375 |
| AD-1590745 | GUCAUCACGAUGCCACAGUAA | 46 | UUACUGUGGCAUCGUGAUGACCC | 181 | 376 | 398 |
| AD-1590754 | AUGCCACAGUACCUGCGCAAA | 47 | UUUGCGCAGGUACUGUGGCAUCG | 182 | 385 | 407 |
| AD-1590763 | UACCUGCGCAAGCGCUUCGGA | 48 | UCCGAAGCGCUUGCGCAGGUACU | 183 | 394 | 416 |
| AD-1590780 | CCUCUACCUGUCUGUGCUCUA | 49 | UAGAGCACAGACAGGUAGAGGCG | 184 | 429 | 451 |
| AD-1590792 | UGUGCUCUCCCUUUUCCUGUA | 50 | UACAGGAAAAGGGAGAGCACAGA | 185 | 441 | 463 |
| AD-1590801 | CCUUUUCCUGUACAUCUUCAA | 51 | UUGAAGAUGUACAGGAAAAGGGA | 186 | 450 | 472 |
| AD-1590810 | GUACAUCUUCACCAAGAUCUA | 52 | UAGAUCUUGGUGAAGAUGUACAG | 187 | 459 | 481 |
| AD-1590823 | AAGAUCUCAGUGGACAUGUUA | 53 | UAACAUGUCCACUGAGAUCUUGG | 188 | 472 | 494 |
| AD-1590833 | UGGACAUGUUCUCCGGAGCUA | 54 | UAGCUCCGGAGAACAUGUCCACU | 189 | 482 | 504 |
| AD-1590845 | CCGGAGCUGUAUUCAUCCAGA | 55 | UCUGGAUGAAUACAGCUCCGGAG | 190 | 494 | 516 |
| AD-1590859 | AUCCAGCAGGCUCUGGGCUGA | 56 | UCAGCCCAGAGCCUGCUGGAUGA | 191 | 508 | 530 |
| AD-1590873 | GGGCUGGAACAUCUAUGCCUA | 57 | UAGGCAUAGAUGUUCCAGCCCAG | 192 | 522 | 544 |
| AD-1590890 | CCUCCGUCAUCGCGCUUCUGA | 58 | UCAGAAGCGCGAUGACGGAGGCA | 193 | 539 | 561 |
| AD-1590900 | CGCGCUUCUGGGCAUCACCAA | 59 | UUGGUGAUGCCCAGAAGCGCGAU | 194 | 549 | 571 |
| AD-1590909 | GGGCAUCACCAUGAUUUACAA | 60 | UUGUAAAUCAUGGUGAUGCCCAG | 195 | 558 | 580 |
| AD-1590918 | CAUGAUUUACACGGUGACAGA | 61 | UCUGUCACCGUGUAAAUCAUGGU | 196 | 567 | 589 |
| AD-1590927 | CACGGUGACAGGAGGGCUGGA | 62 | UCCAGCCCUCCUGUCACCGUGUA | 197 | 576 | 598 |
| AD-1590941 | CGCGCUGAUGUACACGGACAA | 63 | UUGUCCGUGUACAUCAGCGCGGC | 198 | 597 | 619 |
| AD-1590954 | ACGGACACGGUACAGACCUUA | 64 | UAAGGUCUGUACCGUGUCCGUGU | 199 | 610 | 632 |
| AD-1590963 | GUACAGACCUUCGUCAUUCUA | 65 | UAGAAUGACGAAGGUCUGUACCG | 200 | 619 | 641 |
| AD-1590970 | GCCUGCAUCCUCAUGGGUUAA | 66 | UUAACCCAUGAGGAUGCAGGCGC | 201 | 646 | 668 |
| AD-1590979 | CUCAUGGGUUACGCCUUCCAA | 67 | UUGGAAGGCGUAACCCAUGAGGA | 202 | 655 | 677 |
| AD-1590988 | UACGCCUUCCACGAGGUGGGA | 68 | UCCCACCUCGUGGAAGGCGUAAC | 203 | 664 | 686 |
| AD-1590997 | CACGAGGUGGGCGGGUAUUCA | 69 | UGAAUACCCGCCCACCUCGUGGA | 204 | 673 | 695 |
| AD-1591008 | CGGGUAUUCGGGUCUCUUCGA | 70 | UCGAAGAGACCCGAAUACCCGCC | 205 | 684 | 706 |
| AD-1591018 | GGUCUCUUCGACAAAUACCUA | 71 | UAGGUAUUUGUCGAAGAGACCCG | 206 | 694 | 716 |
| AD-1591035 | CCUGGGAGCAGCGACUUCGCA | 72 | UGCGAAGUCGCUGCUCCCAGGUA | 207 | 711 | 733 |
| AD-1591044 | AGCGACUUCGCUGACGGUGUA | 73 | UACACCGUCAGCGAAGUCGCUGC | 208 | 720 | 742 |
| AD-1591055 | UGACGGUGUCCGAGGAUCCAA | 74 | UUGGAUCCUCGGACACCGUCAGC | 209 | 731 | 753 |
| AD-1591071 | UCCAGCCGUGGGAAACAUCUA | 75 | UAGAUGUUUCCCACGGCUGGAUC | 210 | 747 | 769 |
| AD-1591080 | GGGAAACAUCUCCAGCUUCUA | 76 | UAGAAGCUGGAGAUGUUUCCCAC | 211 | 756 | 778 |
| AD-1591089 | CUCCAGCUUCUGCUAUCGACA | 77 | UGUCGAUAGCAGAAGCUGGAGAU | 212 | 765 | 787 |
| AD-1591100 | UCCUACCACCUGCUCCGGCAA | 78 | UUGCCGGAGCAGGUGGUAGGAGU | 213 | 796 | 818 |
| AD-1591116 | UCGGACUCACAAUCGUCUCGA | 79 | UCGAGACGAUUGUGAGUCCGAGG | 214 | 854 | 876 |
| AD-1591132 | CUCGGGCUGGUACUGGUGCAA | 80 | UUGCACCAGUACCAGCCCGAGAC | 215 | 870 | 892 |
| AD-1591147 | GUGCAGCGACCAGGUCAUCGA | 81 | UCGAUGACCUGGUCGCUGCACCA | 216 | 885 | 907 |
| AD-1591156 | CCAGGUCAUCGUGCAGCGCUA | 82 | UAGCGCUGCACGAUGACCUGGUC | 217 | 894 | 916 |
| AD-1591175 | GGGAAGAGCCUGACCCACAUA | 83 | UAUGUGGGUCAGGCUCUUCCCGG | 218 | 922 | 944 |
| AD-1591186 | GACCCACAUCAAGGCGGGCUA | 84 | UAGCCCGCCUUGAUGUGGGUCAG | 219 | 933 | 955 |
| AD-1591203 | GCUGCAUCCUGUGUGGGUACA | 85 | UGUACCCACACAGGAUGCAGCCC | 220 | 950 | 972 |
| AD-1591220 | UACCUGAAGCUGACGCCCAUA | 86 | UAUGGGCGUCAGCUUCAGGUACC | 221 | 967 | 989 |
| AD-1591234 | GCCCAUGUUUCUCAUGGUCAA | 87 | UUGACCAUGAGAAACAUGGGCGU | 222 | 981 | 1003 |
| AD-1591250 | GUCAUGCCAGGCAUGAUCAGA | 88 | UCUGAUCAUGCCUGGCAUGACCA | 223 | 997 | 1019 |
| AD-1591259 | GGCAUGAUCAGCCGCAUUCUA | 89 | UAGAAUGCGGCUGAUCAUGCCUG | 224 | 1006 | 1028 |
| AD-1591268 | AGCCGCAUUCUGUACCCAGAA | 90 | UUCUGGGUACAGAAUGCGGCUGA | 225 | 1015 | 1037 |
| AD-1591279 | GUACCCAGACGAGGUGGCGUA | 91 | UACGCCACCUCGUCUGGGUACAG | 226 | 1026 | 1048 |
| AD-1591323 | AGGUGGGCUGCUCCAACAUCA | 92 | UGAUGUUGGAGCAGCCCACCUCC | 227 | 1085 | 1107 |
| AD-1591332 | GCUCCAACAUCGCCUACCCGA | 93 | UCGGGUAGGCGAUGUUGGAGCAG | 228 | 1094 | 1116 |
| AD-1591351 | CUCGUCGUGAAGCUCAUGCCA | 94 | UGGCAUGAGCUUCACGACGAGCC | 229 | 1117 | 1139 |
| AD-1591360 | AAGCUCAUGCCCAACGGUCUA | 95 | UAGACCGUUGGGCAUGAGCUUCA | 230 | 1126 | 1148 |
| AD-1591374 | GGUCUGCGCGGACUCAUGCUA | 96 | UAGCAUGAGUCCGCGCAGACCGU | 231 | 1141 | 1163 |
| AD-1591383 | GGACUCAUGCUGGCGGUCAUA | 97 | UAUGACCGCCAGCAUGAGUCCGC | 232 | 1150 | 1172 |
| AD-1591400 | GCUGGCCGCGCUCAUGUCCUA | 98 | UAGGACAUGAGCGCGGCCAGCAU | 233 | 1170 | 1192 |
| AD-1591415 | GUCCUCGCUGGCCUCCAUCUA | 99 | UAGAUGGAGGCCAGCGAGGACAU | 234 | 1185 | 1207 |
| AD-1591424 | GGCCUCCAUCUUCAACAGCAA | 100 | UUGCUGUUGAAGAUGGAGGCCAG | 235 | 1194 | 1216 |
| AD-1591433 | CUUCAACAGCAGCAGCACGCA | 101 | UGCGUGCUGCUGCUGUUGAAGAU | 236 | 1203 | 1225 |
| AD-1591442 | CAGCAGCACGCUCUUCACCAA | 102 | UUGGUGAAGAGCGUGCUGCUGCU | 237 | 1212 | 1234 |
| AD-1591451 | GCUCUUCACCAUGGACAUCUA | 103 | UAGAUGUCCAUGGUGAAGAGCGU | 238 | 1221 | 1243 |
| AD-1591461 | AUGGACAUCUACACGCGCCUA | 104 | UAGGCGCGUGUAGAUGUCCAUGG | 239 | 1231 | 1253 |
| AD-1591497 | GCUCUGGGUGGUGUUCAUCGA | 105 | UCGAUGAACACCACCCAGAGCCG | 240 | 1293 | 1315 |
| AD-1591506 | GGUGUUCAUCGUGGUAGUGUA | 106 | UACACUACCACGAUGAACACCAC | 241 | 1302 | 1324 |
| AD-1591515 | CGUGGUAGUGUCGGUGGCCUA | 107 | UAGGCCACCGACACUACCACGAU | 242 | 1311 | 1333 |
| AD-1591552 | CAGCUCUUCGAUUACAUCCAA | 108 | UUGGAUGUAAUCGAAGAGCUGCC | 243 | 1363 | 1385 |
| AD-1591562 | AUUACAUCCAGGCAGUCUCUA | 109 | UAGAGACUGCCUGGAUGUAAUCG | 244 | 1373 | 1395 |
| AD-1591571 | AGGCAGUCUCUAGCUACCUGA | 110 | UCAGGUAGCUAGAGACUGCCUGG | 245 | 1382 | 1404 |
| AD-1591602 | UUCGUGCUGGCGCUCUUCGUA | 111 | UACGAAGAGCGCCAGCACGAAGA | 246 | 1423 | 1445 |
| AD-1591618 | UGCCGCGCGUUAAUGAGCAGA | 112 | UCUGCUCAUUAACGCGCGGCACG | 247 | 1442 | 1464 |
| AD-1591643 | GGGCCUGGCACGCCUGAUUCA | 113 | UGAAUCAGGCGUGCCAGGCCCAU | 248 | 1497 | 1519 |
| AD-1591653 | CGCCUGAUUCCCGAGUUCUCA | 114 | UGAGAACUCGGGAAUCAGGCGUG | 249 | 1507 | 1529 |
| AD-1591662 | CCCGAGUUCUCCUUCGGCUCA | 115 | UGAGCCGAAGGAGAACUCGGGAA | 250 | 1516 | 1538 |
| AD-1591696 | GGCGUGCCCAGCUUUCCUCUA | 116 | UAGAGGAAAGCUGGGCACGCCGA | 251 | 1557 | 1579 |
| AD-1591708 | UUUCCUCUGCGGCGUGCACUA | 117 | UAGUGCACGCCGCAGAGGAAAGC | 252 | 1569 | 1591 |
| AD-1591717 | CGGCGUGCACUACCUCUACUA | 118 | UAGUAGAGGUAGUGCACGCCGCA | 253 | 1578 | 1600 |
| AD-1591726 | CUACCUCUACUUCGCCAUUGA | 119 | UCAAUGGCGAAGUAGAGGUAGUG | 254 | 1587 | 1609 |
| AD-1591739 | GCCAUUGUGCUGUUCUUCUGA | 120 | UCAGAAGAACAGCACAAUGGCGA | 255 | 1600 | 1622 |
| AD-1591748 | CUGUUCUUCUGCUCUGGCCUA | 121 | UAGGCCAGAGCAGAAGAACAGCA | 256 | 1609 | 1631 |
| AD-1591759 | CUCUGGCCUCCUCACCCUCAA | 122 | UUGAGGGUGAGGAGGCCAGAGCA | 257 | 1620 | 1642 |
| AD-1591769 | CUCACCCUCACGGUCUCCCUA | 123 | UAGGGAGACCGUGAGGGUGAGGA | 258 | 1630 | 1652 |
| AD-1591791 | CACCUCCACCGCCUGGUCUUA | 124 | UAAGACCAGGCGGUGGAGGUGCU | 259 | 1675 | 1697 |
| AD-1591800 | CGCCUGGUCUUCAGUCUCCGA | 125 | UCGGAGACUGAAGACCAGGCGGU | 260 | 1684 | 1706 |
| AD-1591816 | UCCGGCAUAGCAAGGAGGAAA | 126 | UUUCCUCCUUGCUAUGCCGGAGA | 261 | 1700 | 1722 |
| AD-1591827 | AAGGAGGAACGGGAGGACCUA | 127 | UAGGUCCUCCCGUUCCUCCUUGC | 262 | 1711 | 1733 |
| AD-1591836 | CGGGAGGACCUGGAUGCUGAA | 128 | UUCAGCAUCCAGGUCCUCCCGUU | 263 | 1720 | 1742 |
| AD-1591845 | CUGGAUGCUGAUGAGCAGCAA | 129 | UUGCUGCUCAUCAGCAUCCAGGU | 264 | 1729 | 1751 |
| AD-1591854 | GAUGAGCAGCAAGGCUCCUCA | 130 | UGAGGAGCCUUGCUGCUCAUCAG | 265 | 1738 | 1760 |
| AD-1591863 | CAAGGCUCCUCACUCCCUGUA | 131 | UACAGGGAGUGAGGAGCCUUGCU | 266 | 1747 | 1769 |
| AD-1591875 | CUCCCUGUACAGAAUGGGUGA | 132 | UCACCCAUUCUGUACAGGGAGUG | 267 | 1759 | 1781 |
| AD-1591893 | UGCCCAGAGAGUGCCAUGGAA | 133 | UUCCAUGGCACUCUCUGGGCACC | 268 | 1777 | 1799 |
| AD-1591905 | GCCAUGGAGAUGAAUGAGCCA | 134 | UGGCUCAUUCAUCUCCAUGGCAC | 269 | 1789 | 1811 |
| AD-1591910 | ACCAAGCCUCUUCCGCCAGUA | 135 | UACUGGCGGAAGAGGCUUGGUGC | 270 | 1821 | 1843 |
| AD-1591926 | CAGUGCCUGCUCUGGUUUUGA | 136 | UCAAAACCAGAGCAGGCACUGGC | 271 | 1837 | 1859 |
| AD-1591937 | CUGGUUUUGUGGAAUGAGCAA | 137 | UUGCUCAUUCCACAAAACCAGAG | 272 | 1848 | 1870 |
| AD-1591964 | CUGGAGGACAUCAGCGAGGAA | 138 | UUCCUCGCUGAUGUCCUCCAGCC | 273 | 1930 | 1952 |
| AD-1591973 | AUCAGCGAGGACCCGAGCUGA | 139 | UCAGCUCGGGUCCUCGCUGAUGU | 274 | 1939 | 1961 |
| AD-1591987 | CGUGUGGUCAACCUCAAUGCA | 140 | UGCAUUGAGGUUGACCACACGGG | 275 | 1963 | 1985 |
| AD-1591996 | AACCUCAAUGCCCUGCUCAUA | 141 | UAUGAGCAGGGCAUUGAGGUUGA | 276 | 1972 | 1994 |
| AD-1592007 | CCUGCUCAUGAUGGCAGUGGA | 142 | UCCACUGCCAUCAUGAGCAGGGC | 277 | 1983 | 2005 |
| AD-1592020 | GCAGUGGCCGUGUUCCUCUGA | 143 | UCAGAGGAACACGGCCACUGCCA | 278 | 1996 | 2018 |
| AD-1592027 | UCUAUGCCUAAGACCAACUGA | 144 | UCAGUUGGUCUUAGGCAUAGAAG | 279 | 2021 | 2043 |
| AD-1592036 | AAGACCAACUGCGUUGGACAA | 145 | UUGUCCAACGCAGUUGGUCUUAG | 280 | 2030 | 2052 |
| AD-1592046 | GCGUUGGACACCAUAAGCCAA | 146 | UUGGCUUAUGGUGUCCAACGCAG | 281 | 2040 | 2062 |
| AD-1592063 | CCACAGCCUCACAGGAAGUGA | 147 | UCACUUCCUGUGAGGCUGUGGCU | 282 | 2057 | 2079 |
| AD-1592074 | CUCCCGGCCUUCCUCUGCCUA | 148 | UAGGCAGAGGAAGGCCGGGAGAA | 283 | 2149 | 2171 |
| AD-1592081 | CCACUGCAUCUGAUUGGCAGA | 149 | UCUGCCAAUCAGAUGCAGUGGGC | 284 | 2174 | 2196 |
| AD-1592097 | GCAGUCACUUCCCAUGAGGGA | 150 | UCCCUCAUGGGAAGUGACUGCCA | 285 | 2190 | 2212 |
| AD-1592121 | CUGCAGUUGCCCUAAGGAAAA | 151 | UUUUCCUUAGGGCAACUGCAGCG | 286 | 2223 | 2245 |

TABLE 3
Modified Sense and Antisense Strand SGLT2 dsRNA Sequences

| | | SEQ | | SEQ | | SEQ |
|---|---|---|---|---|---|---|
| Duplex | | ID | | ID | | ID |
| Name | Sense Sequence 5′ to 3′ | NO: | Antisense Sequence 5′ to 3′ | NO: | mRNA Target Sequence 5′ to 3′ | NO: |
| AD- | gsasgaa(Uhd)GfgAfGfGfagcaca | 287 | VPusCfsuguGfuGfCfuccuCfcAfuucuc | 422 | GGGAGAATGGAGGAGCACA | 557 |
| 1590440 | casgsa | | scsc | | CAGA | |
| AD- | gsgsagc(Ahd)CfaCfAfGfaggcag | 288 | VPusAfsgccUfgCfCfucugUfgUfgcucc | 423 | GAGGAGCACACAGAGGCAG | 558 |
| 1590449 | gcsusa | | susc | | GCTC | |
| AD- | gscsagg(Chd)UfcGfGfCfaccaga | 289 | VPusAfsucuCfuGfGfugccGfaGfccugc | 424 | AGGCAGGCTCGGCACCAGAG | 559 |
| 1590462 | gasusa | | scsu | | ATG | |
| AD- | cscscag(Ahd)AfgGfCfCfcugauu | 290 | VPusGfsucaAfuCfAfgggcCfuUfcugg | 425 | GGCCCAGAAGGCCCTGATTG | 560 |
| 1590468 | gascsa | | gscsc | | ACA | |
| AD- | cscscug(Ahd)UfuGfAfCfaauccu | 291 | VPusAfsgcaGfgAfUfugucAfaUfcagg | 426 | GGCCCTGATTGACAATCCTG | 561 |
| 1590477 | gcsusa | | gscsc | | CTG | |
| AD- | ascsaau(Chd)CfuGfCfUfgacaucc | 292 | VPusUfsaggAfuGfUfcagcAfgGfauug | 427 | TGACAATCCTGCTGACATCCT | 562 |
| 1590486 | usasa | | uscsa | | AG | |
| AD- | usgsaca(Uhd)CfcUfAfGfucauug | 293 | VPusCfsagcAfaUfGfacuaGfgAfuguca | 428 | GCTGACATCCTAGTCATTGCT | 563 |
| 1590496 | cusgsa | | sgsc | | GC | |
| AD- | gsuscau(Uhd)GfcUfGfCfauauuu | 294 | VPusAfsggaAfaUfAfugcaGfcAfaugac | 429 | TAGTCATTGCTGCATATTTCC | 564 |
| 1590506 | ccsusa | | susa | | TG | |
| AD- | gscsaua(Uhd)UfuCfCfUfgcuggu | 295 | VPusAfsugaCfcAfGfcaggAfaAfuaugc | 430 | CTGCATATTTCCTGCTGGTCA | 565 |
| 1590515 | casusa | | sasg | | TT | |
| AD- | csusgcu(Ghd)GfuCfAfUfuggcgu | 296 | VPusCfscaaCfgCfCfaaugAfcCfagcags | 431 | TCCTGCTGGTCATTGGCGTTG | 566 |
| 1590524 | ugsgsa | | gsa | | GC | |
| AD- | usgsgcg(Uhd)UfgGfCfUfugugg | 297 | VPusUfsggaCfcAfCfaagcCfaAfcgcca | 432 | ATTGGCGTTGGCTTGTGGTCC | 567 |
| 1590535 | uccsasa | | sasu | | AT | |
| AD- | gsuscca(Uhd)GfuGfCfAfgaacca | 298 | VPusUfsguuGfgUfUfcugcAfcAfugga | 433 | TGGTCCATGTGCAGAACCAA | 568 |
| 1590550 | acsasa | | cscsa | | CAG | |
| AD- | csasgaa(Chd)CfaAfCfAfgaggcac | 299 | VPusCfsaguGfcCfUfcuguUfgGfuucu | 434 | TGCAGAACCAACAGAGGCAC | 569 |
| 1590559 | usgsa | | gscsa | | TGT | |
| AD- | asgsagg(Chd)AfcUfGfUfgggcgg | 300 | VPusUfsagcCfgCfCfcacaGfuGfccucu | 435 | ACAGAGGCACTGTGGGCGGC | 570 |
| 1590569 | cusasa | | sgsu | | TAC | |
| AD- | usgsggc(Ghd)GfcUfAfCfuuccug | 301 | VPusUfsgccAfgGfAfaguaGfcCfgccca | 436 | TGTGGGCGGCTACTTCCTGG | 571 |
| 1590579 | gcsasa | | scsa | | CAG | |
| AD- | csusucc(Uhd)GfgCfAfGfgacgca | 302 | VPusUfsgcuGfcGfUfccugCfcAfggaag | 437 | TACTTCCTGGCAGGACGCAG | 572 |
| 1590589 | gcsasa | | susa | | CAT | |
| AD- | asgsgac(Ghd)CfaGfCfAfuggugu | 303 | VPusAfsccaCfaCfCfaugcUfgCfguccu | 438 | GCAGGACGCAGCATGGTGTG | 573 |
| 1590598 | ggsusa | | sgsc | | GTG | |
| AD- | cscsucu(Chd)UfcUfUfCfgccagc | 304 | VPusGfsuugCfuGfGfcgaaGfaGfagagg | 439 | GGCCTCTCTCTTCGCCAGCAA | 574 |
| 1590611 | aascsa | | scsc | | CA | |
| AD- | uscsgcc(Ahd)GfcAfAfCfaucggc | 305 | VPusAfscugCfcGfAfuguuGfcUfggcg | 440 | CTTCGCCAGCAACATCGGCA | 575 |
| 1590620 | agsusa | | asasg | | GTG | |
| AD- | csasucg(Ghd)CfaGfUfGfgccacu | 306 | VPusCfsaaaGfuGfGfccacUfgCfcgaug | 441 | AACATCGGCAGTGGCCACTT | 576 |
| 1590630 | uusgsa | | susu | | TGT | |
| AD- | usgsgcc(Ahd)CfuUfUfGfugggcc | 307 | VPusCfscagGfcCfCfacaaAfgUfggcca | 442 | AGTGGCCACTTTGTGGGCCT | 577 |
| 1590639 | ugsgsa | | scsu | | GGC | |
| AD- | csusgca(Ahd)GfuGfGfCfuuggcu | 308 | VPusAfsacaGfcCfAfagccAfcUfugcag | 443 | CGCTGCAAGTGGCTTGGCTG | 578 |
| 1590666 | gususa | | scsg | | TTG | |
| AD- | ususggc(Uhd)GfuUfGfCfuggauu | 309 | VPusUfscgaAfuCfCfagcaAfcAfgccaa | 444 | GCTTGGCTGTTGCTGGATTCG | 579 |
| 1590677 | cgsasa | | sgsc | | AG | |
| AD- | csgsagu(Ghd)GfaAfUfGfcgcucu | 310 | VPusCfsgaaGfaGfCfgcauUfcCfacucg | 445 | TTCGAGTGGAATGCGCTCTTC | 580 |
| 1590694 | ucsgsa | | sasa | | GT | |
| AD- | gscsgcu(Chd)UfuCfGfUfggugcu | 311 | VPusAfsgcaGfcAfCfcacgAfaGfagcgc | 446 | ATGCGCTCTTCGTGGTGCTGC | 581 |
| 1590704 | gcsusa | | sasu | | TA | |
| AD- | gsusggu(Ghd)CfuGfCfUfacuggg | 312 | VPusCfsagcCfcAfGfuagcAfgCfaccac | 447 | TCGTGGTGCTGCTACTGGGCT | 582 |
| 1590713 | cusgsa | | sgsa | | GG | |
| AD- | csusacu(Ghd)GfgCfUfGfgcuguu | 313 | VPusGfscaaAfcAfGfccagCfcCfaguag | 448 | TGCTACTGGGCTGGCTGTTTG | 583 |
| 1590722 | ugscsa | | scsa | | CA | |
| AD- | usgsgcu(Ghd)UfuUfGfCfacccgu | 314 | VPusUfsacaCfgGfGfugcaAfaCfagcca | 449 | GCTGGCTGTTTGCACCCGTGT | 584 |
| 1590731 | gusasa | | sgsc | | AC | |
| AD- | csasccc(Ghd)UfgUfAfCfcugaca | 315 | VPusCfsgcuGfuCfAfgguaCfaCfgggug | 450 | TGCACCCGTGTACCTGACAG | 585 |
| 1590741 | gcsgsa | | scsa | | CGG | |
| AD- | gsuscau(Chd)AfcGfAfUfgccaca | 316 | VPusUfsacuGfuGfGfcaucGfuGfaugac | 451 | GGGTCATCACGATGCCACAG | 586 |
| 1590745 | gusasa | | scsc | | TAC | |
| AD- | asusgcc(Ahd)CfaGfUfAfccugcg | 317 | VPusUfsugcGfcAfGfguacUfgUfggca | 452 | CGATGCCACAGTACCTGCGC | 587 |
| 1590754 | casasa | | uscsg | | AAG | |
| AD- | usasccu(Ghd)CfgCfAfAfgcgcuu | 318 | VPusCfscgaAfgCfGfcuugCfgCfaggua | 453 | AGTACCTGCGCAAGCGCTTC | 588 |
| 1590763 | cgsgsa | | scsu | | GGC | |
| AD- | cscsucu(Ahd)CfcUfGfUfcugugc | 319 | VPusAfsgagCfaCfAfgacaGfgUfagagg | 454 | CGCCTCTACCTGTCTGTGCTC | 589 |
| 1590780 | ucsusa | | scsg | | TC | |
| AD- | usgsugc(Uhd)CfuCfCfCfuuuucc | 320 | VPusAfscagGfaAfAfagggAfgAfgcaca | 455 | TCTGTGCTCTCCCTTTTCCTG | 590 |
| 1590792 | ugsusa | | sgsa | | TA | |
| AD- | cscsuuu(Uhd)CfcUfGfUfacaucu | 321 | VPusUfsgaaGfaUfGfuacaGfgAfaaagg | 456 | TCCCTTTTCCTGTACATCTTC | 591 |
| 1590801 | ucsasa | | sgsa | | AC | |
| AD- | gsusaca(Uhd)CfuUfCfAfccaaga | 322 | VPusAfsgauCfuUfGfgugaAfgAfugua | 457 | CTGTACATCTTCACCAAGATC | 592 |
| 1590810 | ucsusa | | csasg | | TC | |
| AD- | asasgau(Chd)UfcAfGfUfggacau | 323 | VPusAfsacaUfgUfCfcacuGfaGfaucuu | 458 | CCAAGATCTCAGTGGACATG | 593 |
| 1590823 | gususa | | sgsg | | TTC | |
| AD- | usgsgac(Ahd)UfgUfUfCfuccgga | 324 | VPusAfsgcuCfcGfGfagaaCfaUfgucca | 459 | AGTGGACATGTTCTCCGGAG | 594 |
| 1590833 | gcsusa | | scsu | | CTG | |
| AD- | cscsgga(Ghd)CfuGfUfAfuucauc | 325 | VPusCfsuggAfuGfAfauacAfgCfuccgg | 460 | CTCCGGAGCTGTATTCATCCA | 595 |
| 1590845 | casgsa | | sasg | | GC | |
| AD- | asuscca(Ghd)CfaGfGfCfucuggg | 326 | VPusCfsagcCfcAfGfagccUfgCfuggau | 461 | TCATCCAGCAGGCTCTGGGC | 596 |
| 1590859 | cusgsa | | sgsa | | TGG | |
| AD- | gsgsgcu(Ghd)GfaAfCfAfucuaug | 327 | VPusAfsggcAfuAfGfauguUfcCfagccc | 462 | CTGGGCTGGAACATCTATGC | 597 |
| 1590873 | ccsusa | | sasg | | CTC | |
| AD- | cscsucc(Ghd)UfcAfUfCfgcgcuu | 328 | VPusCfsagaAfgCfGfcgauGfaCfggagg | 463 | TGCCTCCGTCATCGCGCTTCT | 598 |
| 1590890 | cusgsa | | scsa | | GG | |
| AD- | csgscgc(Uhd)UfcUfGfGfgcauca | 329 | VPusUfsgguGfaUfGfcccaGfaAfgcgcg | 464 | ATCGCGCTTCTGGGCATCAC | 599 |
| 1590900 | ccsasa | | sasu | | CAT | |
| AD- | gsgsgca(Uhd)CfaCfCfAfugauuu | 330 | VPusUfsguaAfaUfCfauggUfgAfugccc | 465 | CTGGGCATCACCATGATTTA | 600 |
| 1590909 | acsasa | | sasg | | CAC | |
| AD- | csasuga(Uhd)UfuAfCfAfcgguga | 331 | VPusCfsuguCfaCfCfguguAfaAfucaug | 466 | ACCATGATTTACACGGTGAC | 601 |
| 1590918 | casgsa | | sgsu | | AGG | |
| AD- | csascgg(Uhd)GfaCfAfGfgagggc | 332 | VPusCfscagCfcCfUfccugUfcAfccgug | 467 | TACACGGTGACAGGAGGGCT | 602 |
| 1590927 | ugsgsa | | susa | | GGC | |
| AD- | csgscgc(Uhd)GfaUfGfUfacacgg | 333 | VPusUfsgucCfgUfGfuacaUfcAfgcgcg | 468 | GCCGCGCTGATGTACACGGA | 603 |
| 1590941 | acsasa | | sgsc | | CAC | |
| AD- | ascsgga(Chd)AfcGfGfUfacagac | 334 | VPusAfsaggUfcUfGfuaccGfuGfuccgu | 469 | ACACGGACACGGTACAGACC | 604 |
| 1590954 | cususa | | sgsu | | TTC | |
| AD- | gsusaca(Ghd)AfcCfUfUfcgucau | 335 | VPusAfsgaaUfgAfCfgaagGfuCfuguac | 470 | CGGTACAGACCTTCGTCATTC | 605 |
| 1590963 | ucsusa | | scsg | | TG | |
| AD- | gscscug(Chd)AfuCfCfUfcauggg | 336 | VPusUfsaacCfcAfUfgaggAfuGfcaggc | 471 | GCGCCTGCATCCTCATGGGTT | 606 |
| 1590970 | uusasa | | sgsc | | AC | |
| AD- | csuscau(Ghd)GfgUfUfAfcgccuu | 337 | VPusUfsggaAfgGfCfguaaCfcCfaugag | 472 | TCCTCATGGGTTACGCCTTCC | 607 |
| 1590979 | ccsasa | | sgsa | | AC | |
| AD- | usascgc(Chd)UfuCfCfAfcgaggu | 338 | VPusCfsccaCfcUfCfguggAfaGfgcgua | 473 | GTTACGCCTTCCACGAGGTG | 608 |
| 1590988 | ggsgsa | | sasc | | GGC | |
| AD- | csascga(Ghd)GfuGfGfGfcgggua | 339 | VPusGfsaauAfcCfCfgcccAfcCfucgug | 474 | TCCACGAGGTGGGCGGGTAT | 609 |
| 1590997 | uuscsa | | sgsa | | TCG | |
| AD- | csgsggu(Ahd)UfuCfGfGfgucucu | 340 | VPusCfsgaaGfaGfAfcccgAfaUfacccg | 475 | GGCGGGTATTCGGGTCTCTTC | 610 |
| 1591008 | ucsgsa | | scSC | | GA | |
| AD- | gsgsucu(Chd)UfuCfGfAfcaaaua | 341 | VPusAfsgguAfuUfUfgucgAfaGfagac | 476 | CGGGTCTCTTCGACAAATAC | 611 |
| 1591018 | ccsusa | | cscsg | | CTG | |
| AD- | cscsugg(Ghd)AfgCfAfGfcgacuu | 342 | VPusGfscgaAfgUfCfgcugCfuCfccagg | 477 | TACCTGGGAGCAGCGACTTC | 612 |
| 1591035 | cgscsa | | susa | | GCT | |
| AD- | asgscga(Chd)UfuCfGfCfugacgg | 343 | VPusAfscacCfgUfCfagcgAfaGfucgcu | 478 | GCAGCGACTTCGCTGACGGT | 613 |
| 1591044 | ugsusa | | sgsc | | GTC | |
| AD- | usgsacg(Ghd)UfgUfCfCfgaggau | 344 | VPusUfsggaUfcCfUfcggaCfaCfcguca | 479 | GCTGACGGTGTCCGAGGATC | 614 |
| 1591055 | ccsasa | | sgsc | | CAG | |
| AD- | uscscag(Chd)CfgUfGfGfgaaaca | 345 | VPusAfsgauGfuUfUfcccaCfgGfcugga | 480 | GATCCAGCCGTGGGAAACAT | 615 |
| 1591071 | ucsusa | | susc | | CTC | |
| AD- | gsgsgaa(Ahd)CfaUfCfUfccagcu | 346 | VPusAfsgaaGfcUfGfgagaUfgUfuuccc | 481 | GTGGGAAACATCTCCAGCTT | 616 |
| 1591080 | ucsusa | | sasc | | CTG | |
| AD- | csuscca(Ghd)CfuUfCfUfgcuauc | 347 | VPusGfsucgAfuAfGfcagaAfgCfugga | 482 | ATCTCCAGCTTCTGCTATCGA | 617 |
| 1591089 | gascsa | | gsasu | | CC | |
| AD- | uscscua(Chd)CfaCfCfUfgcuccg | 348 | VPusUfsgccGfgAfGfcaggUfgGfuagg | 483 | ACTCCTACCACCTGCTCCGGC | 618 |
| 1591100 | gcsasa | | asgsu | | AC | |
| AD- | uscsgga(Chd)UfcAfCfAfaucguc | 349 | VPusCfsgagAfcGfAfuuguGfaGfuccga | 484 | CCTCGGACTCACAATCGTCTC | 619 |
| 1591116 | ucsgsa | | sgsg | | GG | |
| AD- | csuscgg(Ghd)CfuGfGfUfacuggu | 350 | VPusUfsgcaCfcAfGfuaccAfgCfccgag | 485 | GTCTCGGGCTGGTACTGGTG | 620 |
| 1591132 | gcsasa | | sasc | | CAG | |
| AD- | gsusgca(Ghd)CfgAfCfCfagguca | 351 | VPusCfsgauGfaCfCfugguCfgCfugcac | 486 | TGGTGCAGCGACCAGGTCAT | 621 |
| 1591147 | ucsgsa | | scsa | | CGT | |
| AD- | cscsagg(Uhd)CfaUfCfGfugcagc | 352 | VPusAfsgcgCfuGfCfacgaUfgAfccugg | 487 | GACCAGGTCATCGTGCAGCG | 622 |
| 1591156 | gcsusa | | susc | | CTG | |
| AD- | gsgsgaa(Ghd)AfgCfCfUfgaccca | 353 | VPusAfsuguGfgGfUfcaggCfuCfuuccc | 488 | CCGGGAAGAGCCTGACCCAC | 623 |
| 1591175 | casusa | | sgsg | | ATC | |
| AD- | gsasccc(Ahd)CfaUfCfAfaggcgg | 354 | VPusAfsgccCfgCfCfuugaUfgUfggguc | 489 | CTGACCCACATCAAGGCGGG | 624 |
| 1591186 | gcsusa | | sasg | | CTG | |
| AD- | gscsugc(Ahd)UfcCfUfGfuguggg | 355 | VPusGfsuacCfcAfCfacagGfaUfgcagc | 490 | GGGCTGCATCCTGTGTGGGT | 625 |
| 1591203 | uascsa | | scsc | | ACC | |
| AD- | usasccu(Ghd)AfaGfCfUfgacgcc | 356 | VPusAfsuggGfcGfUfcagcUfuCfaggua | 491 | GGTACCTGAAGCTGACGCCC | 626 |
| 1591220 | casusa | | scsc | | ATG | |
| AD- | gscscca(Uhd)GfuUfUfCfucaugg | 357 | VPusUfsgacCfaUfGfagaaAfcAfugggc | 492 | ACGCCCATGTTTCTCATGGTC | 627 |
| 1591234 | ucsasa | | sgsu | | AT | |
| AD- | gsuscau(Ghd)CfcAfGfGfcaugau | 358 | VPusCfsugaUfcAfUfgccuGfgCfaugac | 493 | TGGTCATGCCAGGCATGATC | 628 |
| 1591250 | casgsa | | scsa | | AGC | |
| AD- | gsgscau(Ghd)AfuCfAfGfccgcau | 359 | VPusAfsgaaUfgCfGfgcugAfuCfaugcc | 494 | CAGGCATGATCAGCCGCATT | 629 |
| 1591259 | ucsusa | | susg | | CTG | |
| AD- | asgsccg(Chd)AfuUfCfUfguaccc | 360 | VPusUfscugGfgUfAfcagaAfuGfcggc | 495 | TCAGCCGCATTCTGTACCCA | 630 |
| 1591268 | agsasa | | usgsa | | GAC | |
| AD- | gsusacc(Chd)AfgAfCfGfaggugg | 361 | VPusAfscgcCfaCfCfucguCfuGfgguac | 496 | CTGTACCCAGACGAGGTGGC | 631 |
| 1591279 | cgsusa | | sasg | | GTG | |
| AD- | asgsgug(Ghd)GfcUfGfCfuccaac | 362 | VPusGfsaugUfuGfGfagcaGfcCfcaccu | 497 | GGAGGTGGGCTGCTCCAACA | 632 |
| 1591323 | auscsa | | scsc | | TCG | |
| AD- | gscsucc(Ahd)AfcAfUfCfgccuac | 363 | VPusCfsgggUfaGfGfcgauGfuUfggag | 498 | CTGCTCCAACATCGCCTACCC | 633 |
| 1591332 | ccsgsa | | csasg | | GC | |
| AD- | csuscgu(Chd)GfuGfAfAfgcucau | 364 | VPusGfsgcaUfgAfGfcuucAfcGfacgag | 499 | GGCTCGTCGTGAAGCTCATG | 634 |
| 1591351 | gcscsa | | scsc | | CCC | |
| AD- | asasgcu(Chd)AfuGfCfCfcaacgg | 365 | VPusAfsgacCfgUfUfgggcAfuGfagcu | 500 | TGAAGCTCATGCCCAACGGT | 635 |
| 1591360 | ucsusa | | uscsa | | CTG | |
| AD- | gsgsucu(Ghd)CfgCfGfGfacucau | 366 | VPusAfsgcaUfgAfGfuccgCfgCfagacc | 501 | ACGGTCTGCGCGGACTCATG | 636 |
| 1591374 | gcsusa | | sgsu | | CTG | |
| AD- | gsgsacu(Chd)AfuGfCfUfggcggu | 367 | VPusAfsugaCfcGfCfcagcAfuGfagucc | 502 | GCGGACTCATGCTGGCGGTC | 637 |
| 1591383 | casusa | | sgsc | | ATG | |
| AD- | gscsugg(Chd)CfgCfGfCfucaugu | 368 | VPusAfsggaCfaUfGfagcgCfgGfccagc | 503 | ATGCTGGCCGCGCTCATGTC | 638 |
| 1591400 | ccsusa | | sasu | | CTC | |
| AD- | gsusccu(Chd)GfcUfGfGfccucca | 369 | VPusAfsgauGfgAfGfgccaGfcGfaggac | 504 | ATGTCCTCGCTGGCCTCCATC | 639 |
| 1591415 | ucsusa | | sasu | | TT | |
| AD- | gsgsccu(Chd)CfaUfCfUfucaaca | 370 | VPusUfsgcuGfuUfGfaagaUfgGfaggcc | 505 | CTGGCCTCCATCTTCAACAGC | 640 |
| 1591424 | gcsasa | | sasg | | AG | |
| AD- | csusuca(Ahd)CfaGfCfAfgcagca | 371 | VPusGfscguGfcUfGfcugcUfgUfugaa | 506 | ATCTTCAACAGCAGCAGCAC | 641 |
| 1591433 | cgscsa | | gsasu | | GCT | |
| AD- | csasgca(Ghd)CfaCfGfCfucuucac | 372 | VPusUfsgguGfaAfGfagcgUfgCfugcu | 507 | AGCAGCAGCACGCTCTTCAC | 642 |
| 1591442 | csasa | | gscsu | | CAT | |
| AD- | gscsucu(Uhd)CfaCfCfAfuggaca | 373 | VPusAfsgauGfuCfCfauggUfgAfagagc | 508 | ACGCTCTTCACCATGGACAT | 643 |
| 1591451 | ucsusa | | sgsu | | CTA | |
| AD- | asusgga(Chd)AfuCfUfAfcacgcg | 374 | VPusAfsggcGfcGfUfguagAfuGfucca | 509 | CCATGGACATCTACACGCGC | 644 |
| 1591461 | ccsusa | | usgsg | | CTG | |
| AD- | gscsucu(Ghd)GfgUfGfGfuguuca | 375 | VPusCfsgauGfaAfCfaccaCfcCfagagcs | 510 | CGGCTCTGGGTGGTGTTCATC | 645 |
| 1591497 | ucsgsa | | csg | | GT | |
| AD- | gsgsugu(Uhd)CfaUfCfGfugguag | 376 | VPusAfscacUfaCfCfacgaUfgAfacaccs | 511 | GTGGTGTTCATCGTGGTAGT | 646 |
| 1591506 | ugsusa | | asc | | GTC | |
| AD- | csgsugg(Uhd)AfgUfGfUfcggug | 377 | VPusAfsggcCfaCfCfgacaCfuAfccacg | 512 | ATCGTGGTAGTGTCGGTGGC | 647 |
| 1591515 | gccsusa | | sasu | | CTG | |
| AD- | csasgcu(Chd)UfuCfGfAfuuacau | 378 | VPusUfsggaUfgUfAfaucgAfaGfagcu | 513 | GGCAGCTCTTCGATTACATCC | 648 |
| 1591552 | ccsasa | | gscsc | | AG | |
| AD- | asusuac(Ahd)UfcCfAfGfgcaguc | 379 | VPusAfsgagAfcUfGfccugGfaUfguaau | 514 | CGATTACATCCAGGCAGTCT | 649 |
| 1591562 | ucsusa | | scsg | | CTA | |
| AD- | asgsgca(Ghd)UfcUfCfUfagcuac | 380 | VPusCfsaggUfaGfCfuagaGfaCfugccu | 515 | CCAGGCAGTCTCTAGCTACC | 650 |
| 1591571 | cusgsa | | sgsg | | TGG | |
| AD- | ususcgu(Ghd)CfuGfGfCfgcucuu | 381 | VPusAfscgaAfgAfGfcgccAfgCfacgaa | 516 | TCTTCGTGCTGGCGCTCTTCG | 651 |
| 1591602 | cgsusa | | sgsa | | TG | |
| AD- | usgsccg(Chd)GfcGfUfUfaaugag | 382 | VPusCfsugcUfcAfUfuaacGfcGfcggca | 517 | CGTGCCGCGCGTTAATGAGC | 652 |
| 1591618 | casgsa | | scsg | | AGG | |
| AD- | gsgsgcc(Uhd)GfgCfAfCfgccuga | 383 | VPusGfsaauCfaGfGfcgugCfcAfggccc | 518 | ATGGGCCTGGCACGCCTGAT | 653 |
| 1591643 | uuscsa | | sasu | | TCC | |
| AD- | csgsccu(Ghd)AfuUfCfCfcgaguu | 384 | VPusGfsagaAfcUfCfgggaAfuCfaggcg | 519 | CACGCCTGATTCCCGAGTTCT | 654 |
| 1591653 | cuscsa | | susg | | CC | |
| AD- | cscscga(Ghd)UfuCfUfCfcuucgg | 385 | VPusGfsagcCfgAfAfggagAfaCfucggg | 520 | TTCCCGAGTTCTCCTTCGGCT | 655 |
| 1591662 | cuscsa | | sasa | | CG | |
| AD- | gsgscgu(Ghd)CfcCfAfGfcuuucc | 386 | VPusAfsgagGfaAfAfgcugGfgCfacgcc | 521 | TCGGCGTGCCCAGCTTTCCTC | 656 |
| 1591696 | ucsusa | | sgsa | | TG | |
| AD- | ususucc(Uhd)CfuGfCfGfgcgugc | 387 | VPusAfsgugCfaCfGfccgcAfgAfggaaa | 522 | GCTTTCCTCTGCGGCGTGCAC | 657 |
| 1591708 | acsusa | | sgsc | | TA | |
| AD- | csgsgcg(Uhd)GfcAfCfUfaccucu | 388 | VPusAfsguaGfaGfGfuaguGfcAfcgccg | 523 | TGCGGCGTGCACTACCTCTA | 658 |
| 1591717 | acsusa | | scsa | | CTT | |
| AD- | csusacc(Uhd)CfuAfCfUfucgcca | 389 | VPusCfsaauGfgCfGfaaguAfgAfgguag | 524 | CACTACCTCTACTTCGCCATT | 659 |
| 1591726 | uusgsa | | susg | | GT | |
| AD- | gscscau(Uhd)GfuGfCfUfguucuu | 390 | VPusCfsagaAfgAfAfcagcAfcAfauggc | 525 | TCGCCATTGTGCTGTTCTTCT | 660 |
| 1591739 | cusgsa | | sgsa | | GC | |
| AD- | csusguu(Chd)UfuCfUfGfcucugg | 391 | VPusAfsggcCfaGfAfgcagAfaGfaacag | 526 | TGCTGTTCTTCTGCTCTGGCC | 661 |
| 1591748 | ccsusa | | scsa | | TC | |
| AD- | csuscug(Ghd)CfcUfCfCfucaccc | 392 | VPusUfsgagGfgUfGfaggaGfgCfcagag | 527 | TGCTCTGGCCTCCTCACCCTC | 662 |
| 1591759 | ucsasa | | scsa | | AC | |
| AD- | csuscac(Chd)CfuCfAfCfggucuc | 393 | VPusAfsgggAfgAfCfcgugAfgGfguga | 528 | TCCTCACCCTCACGGTCTCCC | 663 |
| 1591769 | ccsusa | | gsgsa | | TG | |
| AD- | csasccu(Chd)CfaCfCfGfccugguc | 394 | VPusAfsagaCfcAfGfgcggUfgGfaggu | 529 | AGCACCTCCACCGCCTGGTC | 664 |
| 1591791 | ususa | | gscsu | | TTC | |
| AD- | csgsccu(Ghd)GfuCfUfUfcagucu | 395 | VPusCfsggaGfaCfUfgaagAfcCfaggcg | 530 | ACCGCCTGGTCTTCAGTCTCC | 665 |
| 1591800 | ccsgsa | | sgsu | | GG | |
| AD- | uscscgg(Chd)AfuAfGfCfaaggag | 396 | VPusUfsuccUfcCfUfugcuAfuGfccgga | 531 | TCTCCGGCATAGCAAGGAGG | 666 |
| 1591816 | gasasa | | sgsa | | AAC | |
| AD- | asasgga(Ghd)GfaAfCfGfggagga | 397 | VPusAfsgguCfcUfCfccguUfcCfuccuu | 532 | GCAAGGAGGAACGGGAGGA | 667 |
| 1591827 | ccsusa | | sgsc | | CCTG | |
| AD- | csgsgga(Ghd)GfaCfCfUfggaugc | 398 | VPusUfscagCfaUfCfcaggUfcCfucccg | 533 | AACGGGAGGACCTGGATGCT | 668 |
| 1591836 | ugsasa | | susu | | GAT | |
| AD- | csusgga(Uhd)GfcUfGfAfugagca | 399 | VPusUfsgcuGfcUfCfaucaGfcAfuccag | 534 | ACCTGGATGCTGATGAGCAG | 669 |
| 1591845 | gcsasa | | sgsu | | CAA | |
| AD- | gsasuga(Ghd)CfaGfCfAfaggcuc | 400 | VPusGfsaggAfgCfCfuugcUfgCfucauc | 535 | CTGATGAGCAGCAAGGCTCC | 670 |
| 1591854 | cuscsa | | sasg | | TCA | |
| AD- | csasagg(Chd)UfcCfUfCfacucccu | 401 | VPusAfscagGfgAfGfugagGfaGfccuu | 536 | AGCAAGGCTCCTCACTCCCT | 671 |
| 1591863 | gsusa | | gscsu | | GTA | |
| AD- | csusccc(Uhd)GfuAfCfAfgaaugg | 402 | VPusCfsaccCfaUfUfcuguAfcAfgggag | 537 | CACTCCCTGTACAGAATGGG | 672 |
| 1591875 | gusgsa | | susg | | TGC | |
| AD- | usgsccc(Ahd)GfaGfAfGfugccau | 403 | VPusUfsccaUfgGfCfacucUfcUfgggca | 538 | GGTGCCCAGAGAGTGCCATG | 673 |
| 1591893 | ggsasa | | scsc | | GAG | |
| AD- | gscscau(Ghd)GfaGfAfUfgaauga | 404 | VPusGfsgcuCfaUfUfcaucUfcCfauggc | 539 | GTGCCATGGAGATGAATGAG | 674 |
| 1591905 | gcscsa | | sasc | | CCC | |
| AD- | ascscaa(Ghd)CfcUfCfUfuccgcca | 405 | VPusAfscugGfcGfGfaagaGfgCfuugg | 540 | GCACCAAGCCTCTTCCGCCA | 675 |
| 1591910 | gsusa | | usgsc | | GTG | |
| AD- | csasgug(Chd)CfuGfCfUfcugguu | 406 | VPusCfsaaaAfcCfAfgagcAfgGfcacug | 541 | GCCAGTGCCTGCTCTGGTTTT | 676 |
| 1591926 | uusgsa | | sgsc | | GT | |
| AD- | csusggu(Uhd)UfuGfUfGfgaauga | 407 | VPusUfsgcuCfaUfUfccacAfaAfaccag | 542 | CTCTGGTTTTGTGGAATGAGC | 677 |
| 1591937 | gcsasa | | sasg | | AG | |
| AD- | csusgga(Ghd)GfaCfAfUfcagcga | 408 | VPusUfsccuCfgCfUfgaugUfcCfuccag | 543 | GGCTGGAGGACATCAGCGAG | 678 |
| 1591964 | ggsasa | | scsc | | GAC | |
| AD- | asuscag(Chd)GfaGfGfAfcccgag | 409 | VPusCfsagcUfcGfGfguccUfcGfcugau | 544 | ACATCAGCGAGGACCCGAGC | 679 |
| 1591973 | cusgsa | | sgsu | | TGG | |
| AD- | csgsugu(Ghd)GfuCfAfAfccucaa | 410 | VPusGfscauUfgAfGfguugAfcCfacacg | 545 | CCCGTGTGGTCAACCTCAAT | 680 |
| 1591987 | ugscsa | | sgsg | | GCC | |
| AD- | asasccu(Chd)AfaUfGfCfccugcu | 411 | VPusAfsugaGfcAfGfggcaUfuGfaggu | 546 | TCAACCTCAATGCCCTGCTCA | 681 |
| 1591996 | casusa | | usgsa | | TG | |
| AD- | cscsugc(Uhd)CfaUfGfAfuggcag | 412 | VPusCfscacUfgCfCfaucaUfgAfgcagg | 547 | GCCCTGCTCATGATGGCAGT | 682 |
| 1592007 | ugsgsa | | sgsc | | GGC | |
| AD- | gscsagu(Ghd)GfcCfGfUfguuccu | 413 | VPusCfsagaGfgAfAfcacgGfcCfacugc | 548 | TGGCAGTGGCCGTGTTCCTCT | 683 |
| 1592020 | cusgsa | | scsa | | GG | |
| AD- | uscsuau(Ghd)CfcUfAfAfgaccaa | 414 | VPusCfsaguUfgGfUfcuuaGfgCfauaga | 549 | CTTCTATGCCTAAGACCAACT | 684 |
| 1592027 | cusgsa | | sasg | | GC | |
| AD- | asasgac(Chd)AfaCfUfGfcguugg | 415 | VPusUfsgucCfaAfCfgcagUfuGfgucuu | 550 | CTAAGACCAACTGCGTTGGA | 685 |
| 1592036 | acsasa | | sasg | | CAC | |
| AD- | gscsguu(Ghd)GfaCfAfCfcauaag | 416 | VPusUfsggcUfuAfUfggugUfcCfaacgc | 551 | CTGCGTTGGACACCATAAGC | 686 |
| 1592046 | ccsasa | | sasg | | CAC | |
| AD- | cscsaca(Ghd)CfcUfCfAfcaggaag | 417 | VPusCfsacuUfcCfUfgugaGfgCfugugg | 552 | AGCCACAGCCTCACAGGAAG | 687 |
| 1592063 | usgsa | | scsu | | TGG | |
| AD- | csusccc(Ghd)GfcCfUfUfccucug | 418 | VPusAfsggcAfgAfGfgaagGfcCfggga | 553 | TTCTCCCGGCCTTCCTCTGCC | 688 |
| 1592074 | ccsusa | | gsasa | | TG | |
| AD- | cscsacu(Ghd)CfaUfCfUfgauugg | 419 | VPusCfsugcCfaAfUfcagaUfgCfagugg | 554 | GCCCACTGCATCTGATTGGC | 689 |
| 1592081 | casgsa | | sgsc | | AGT | |
| AD- | gscsagu(Chd)AfcUfUfCfccauga | 420 | VPusCfsccuCfaUfGfggaaGfuGfacugc | 555 | TGGCAGTCACTTCCCATGAG | 690 |
| 1592097 | ggsgsa | | scsa | | GGC | |
| AD- | csusgca(Ghd)UfuGfCfCfcuaagg | 421 | VPusUfsuucCfuUfAfgggcAfaCfugcag | 556 | CGCTGCAGTTGCCCTAAGGA | 691 |
| 1592121 | aasasa | | scsg | | AAA | |

TABLE 4
Reporter Screen for Human SLC5A2
in Hepa1-6 Cells

| | RLuc/FLuc | |
|---|---|---|
| | 1 nM | |
| Duplex Name | mean | SD |
| AD-1592121.1 | 43.725 | 3.095 |
| AD-1592097.1 | 92.557 | 9.319 |
| AD-1592081.1 | 53.093 | 5.699 |
| AD-1592074.1 | 73.754 | 5.273 |
| AD-1592063.1 | 68.481 | 5.856 |
| AD-1592046.1 | 29.773 | 2.634 |
| AD-1592036.1 | 91.231 | 7.542 |
| AD-1592027.1 | 70.855 | 5.924 |
| AD-1592020.1 | 77.956 | 8.427 |
| AD-1592007.1 | 82.195 | 5.626 |
| AD-1591996.1 | 56.703 | 2.804 |
| AD-1591987.1 | 67.765 | 3.292 |
| AD-1591973.1 | 83.876 | 5.582 |
| AD-1591964.1 | 66.888 | 6.060 |
| AD-1591937.1 | 33.820 | 2.422 |
| AD-1591926.1 | 54.706 | 3.341 |
| AD-1591910.1 | 70.994 | 7.773 |
| AD-1591905.1 | 47.872 | 5.799 |
| AD-1591893.1 | 49.737 | 6.029 |
| AD-1591875.1 | 44.400 | 3.447 |
| AD-1591863.1 | 67.799 | 5.589 |
| AD-1591854.1 | 80.505 | 6.595 |
| AD-1591845.1 | 54.396 | 5.726 |
| AD-1591836.1 | 80.675 | 5.008 |
| AD-1591827.1 | 91.707 | 7.274 |
| AD-1591816.1 | 58.970 | 3.650 |
| AD-1591800.1 | 42.246 | 2.112 |
| AD-1591791.1 | 72.337 | 4.003 |
| AD-1591769.1 | 77.671 | 8.233 |
| AD-1591759.1 | 59.810 | 4.089 |
| AD-1591748.1 | 47.535 | 2.381 |
| AD-1591739.1 | 16.903 | 1.455 |
| AD-1591726.1 | 37.456 | 2.644 |
| AD-1591717.1 | 43.085 | 3.864 |
| AD-1591708.1 | 64.027 | 6.204 |
| AD-1591696.1 | 66.713 | 5.577 |
| AD-1591662.1 | 59.142 | 7.262 |
| AD-1591653.1 | 46.198 | 3.303 |
| AD-1591643.1 | 68.648 | 3.824 |
| AD-1591618.1 | 76.581 | 5.745 |
| AD-1591602.1 | 92.469 | 10.024 |
| AD-1591571.1 | 78.667 | 8.707 |
| AD-1591562.1 | 62.446 | 6.061 |
| AD-1591552.1 | 41.100 | 5.321 |
| AD-1591515.1 | 54.219 | 6.691 |
| AD-1591506.1 | 32.849 | 4.883 |
| AD-1591497.1 | 48.026 | 6.461 |
| AD-1591461.1 | 76.632 | 5.105 |
| AD-1591451.1 | 35.493 | 3.082 |
| AD-1591442.1 | 40.941 | 4.045 |
| AD-1591433.1 | 48.163 | 3.279 |
| AD-1591424.1 | 43.984 | 1.218 |
| AD-1591415.1 | 66.835 | 8.016 |
| AD-1591400.1 | 66.007 | 5.591 |
| AD-1591383.1 | 72.127 | 8.186 |
| AD-1591374.1 | 56.740 | 4.436 |
| AD-1591360.1 | 48.438 | 3.253 |
| AD-1591351.1 | 41.633 | 2.454 |
| AD-1591332.1 | 86.429 | 6.858 |
| AD-1591323.1 | 51.913 | 3.453 |
| AD-1591279.1 | 93.027 | 7.419 |
| AD-1591268.1 | 37.395 | 1.755 |
| AD-1591259.1 | 40.335 | 2.240 |
| AD-1591250.1 | 92.827 | 4.807 |
| AD-1591234.1 | 46.821 | 3.046 |
| AD-1591220.1 | 49.569 | 4.393 |
| AD-1591203.1 | 86.711 | 5.086 |
| AD-1591186.1 | 52.042 | 6.234 |
| AD-1591175.1 | 73.245 | 4.038 |
| AD-1591156.1 | 62.518 | 4.719 |
| AD-1591147.1 | 85.665 | 5.334 |
| AD-1591132.1 | 58.729 | 3.593 |
| AD-1591116.1 | 31.314 | 2.169 |
| AD-1591100.1 | 85.490 | 4.232 |
| AD-1591089.1 | 40.080 | 1.822 |
| AD-1591080.1 | 68.090 | 6.691 |
| AD-1591071.1 | 68.848 | 3.781 |
| AD-1591055.1 | 75.448 | 4.991 |
| AD-1591044.1 | 42.047 | 3.036 |
| AD-1591035.1 | 66.725 | 1.775 |
| AD-1591018.1 | 17.517 | 0.812 |
| AD-1591008.1 | 28.104 | 2.377 |
| AD-1590997.1 | 76.762 | 3.441 |
| AD-1590988.1 | 66.469 | 6.464 |
| AD-1590979.1 | 26.778 | 2.890 |
| AD-1590970.1 | 60.310 | 5.258 |
| AD-1590963.1 | 35.272 | 2.646 |
| AD-1590954.1 | 38.559 | 1.428 |
| AD-1590941.1 | 53.252 | 5.468 |
| AD-1590927.1 | 87.516 | 4.621 |
| AD-1590918.1 | 40.567 | 2.535 |
| AD-1590909.1 | 26.894 | 2.732 |
| AD-1590900.1 | 62.174 | 9.800 |
| AD-1590890.1 | 83.701 | 9.145 |
| AD-1590873.1 | 26.312 | 2.583 |
| AD-1590859.1 | 84.520 | 7.715 |
| AD-1590845.1 | 39.603 | 5.138 |
| AD-1590833.1 | 58.797 | 5.723 |
| AD-1590823.1 | 46.084 | 4.095 |
| AD-1590810.1 | 14.316 | 0.686 |
| AD-1590801.1 | 25.170 | 1.303 |
| AD-1590792.1 | 44.909 | 2.237 |
| AD-1590780.1 | 36.825 | 3.174 |
| AD-1590763.1 | 52.143 | 3.407 |
| AD-1590754.1 | 89.388 | 5.591 |
| AD-1590745.1 | 42.428 | 3.756 |
| AD-1590741.1 | 60.672 | 3.871 |
| AD-1590731.1 | 38.101 | 2.855 |
| AD-1590722.1 | 45.349 | 2.662 |
| AD-1590713.1 | 54.710 | 1.745 |
| AD-1590704.1 | 36.505 | 1.538 |
| AD-1590694.1 | 15.425 | 0.634 |
| AD-1590677.1 | 23.440 | 2.314 |
| AD-1590666.1 | 24.453 | 3.275 |
| AD-1590639.1 | 76.708 | 5.796 |
| AD-1590630.1 | 54.140 | 4.558 |
| AD-1590620.1 | 82.423 | 4.672 |
| AD-1590611.1 | 74.538 | 5.898 |
| AD-1590598.1 | 45.226 | 4.103 |
| AD-1590589.1 | 76.166 | 6.165 |
| AD-1590579.1 | 59.025 | 3.698 |
| AD-1590569.1 | 88.347 | 2.259 |
| AD-1590559.1 | 61.884 | 3.056 |
| AD-1590550.1 | 28.971 | 1.893 |
| AD-1590535.1 | 27.535 | 0.719 |
| AD-1590524.1 | 21.859 | 0.976 |
| AD-1590515.1 | 25.343 | 1.795 |
| AD-1590506.1 | 20.337 | 0.927 |
| AD-1590496.1 | 17.317 | 0.751 |
| AD-1590486.1 | 20.109 | 1.011 |
| AD-1590477.1 | 27.528 | 1.429 |
| AD-1590468.1 | 46.501 | 2.982 |
| AD-1590462.1 | 57.680 | 4.887 |
| AD-1590449.1 | 42.407 | 4.516 |
| AD-1590440.1 | 45.765 | 3.989 |
| Positive | 1.825 | 0.264 |
| Control | | |

### Example 3. Association of SGLT2 Variants With Serum Urate Level and/or Gout Diagnosis

[0746] To investigate if inhibition of SGLT2 would have an effect on urate level and/or gout diagnosis, data from the UK Biobank was analyzed.

[0747] The UK Biobank, a large long-term biobank study in the United Kingdom (UK) is investigating the respective contributions of genetic predisposition and environmental exposure (including nutrition, lifestyle, medications etc.) to the development of disease (see, e.g. Allen, N. et al. UK Biobank: current status and what it means for epidemiology. Health Policy Technol 1, 123-126 (2012); www.ukbiobank.ac.uk). The study is following about 500,000 volunteers in the UK, enrolled at ages from 40 to 69. Initial enrollment took place over four years from 2006, and the volunteers will be followed for at least 30 years thereafter. A plethora of phenotypic data has been collected including biomarker measurements and disease diagnoses. Recently, exome sequencing data (or the portion of the genomes composed of exons) from about 450,000 participants in the study has been obtained.

[0748] These whole exome sequences were used to identify rare variants likely to have functional impact; predicted loss-of-function (pLOF) variants (i.e. frameshift, stop gain, splice donor or splice acceptor variants) called as high confidence by LOFTEE and missense variants predicted to be damaging (Combined Annotation Dependent Depletion score ≥25) (Karczewski, K. J. et al. Nature 581, 434-443, (2020)). Gene-based collapsing tests (i.e. burden tests) were used to look for associations with urate levels using two variant aggregation strategies: 1) pLOF variants with minor allele frequency ≤1% and 2) pLOF variants plus predicted damaging missense variants with minor allele frequency ≤1%. Burden testing was performed in the unrelated White population (n=363,973) adjusting for age, sex and genetic ancestry via 12 principal components. SLC5A2 (encoding SGLT2) pLOF and predicted damaging missense variants combined significantly associated with decreased urate levels (Table 5). SLC5A2 pLOF and predicted damaging missense variants also significantly associated with increased diagnosis of glycosuria and suggestively associated with decreased diagnosis of gout consistent with their effects on urate (Table 6).

TABLE 5
Association of SGLT2 pLOF and Missense
Variants with Urate Levels

| | | | Effect | |
|---|---|---|---|---|
| | | | (standard | N carrier |
| Phenotype | Variant Set | P-value | deviations) | measured |
| urate | SLC5A2 pLOF + | 1.35E−09 | −0.12 | 1785 |
| | missense | | | |
| urate | SLC5A2 pLOF | 1.46E−05 | −0.21 | 309 |

TABLE 6
Association of SGLT2 pLOF and Missense Variants with Gout and Glycosuria

| | | | Odds Ratio (95% | cases | N |
|---|---|---|---|---|---|
| Phenotype | Variant Set | P-value | confidence interval) | N carrier | expected |
| Glycosuria | SLC5A2 pLOF + missense | 9.62E−33 | 10.42 (7.09-15.32) | 28 | 2.91 |
| (ICD10 R81) | | | | | |
| Gout (ICD10 | SLC5A2 pLOF + missense | 0.003 | 0.61 (0.45-0.85) | 39 | 62.05 |
| M10) | | | | | |

### EQUIVALENTS

[0749] Those skilled in the art will recognize, or be able to ascertain using no more than routine experimentation, many equivalents to the specific embodiments and methods described herein. Such equivalents are intended to be encompassed by the scope of the following claims.

The application's sequence listing, which the Patent Office published only in electronic form, follows.

SEQUENCE LISTING (691 sequences)

SEQ ID NO: 1 - DNA, 2267 bp, Homo sapiens
  source 1..2267: mol_type = genomic DNA
agatcctggggagaatggaggagcacacagaggcaggctcggcaccagagatgggggcccagaaggccctgattgacaatcctgctgacatcctagtcattgctgcatatttcctgctggtcattggcgttggcttgtggtccatgtgcagaaccaacagaggcactgtgggcggctacttcctggcaggacgcagcatggtgtggtggccggttggggcctctctcttcgccagcaacatcggcagtggccactttgtgggcctggcagggactggcgctgcaagtggcttggctgttgctggattcgagtggaatgcgctcttcgtggtgctgctactgggctggctgtttgcacccgtgtacctgacagcgggggtcatcacgatgccacagtacctgcgcaagcgcttcggcggccgccgcatccgcctctacctgtctgtgctctcccttttcctgtacatcttcaccaagatctcagtggacatgttctccggagctgtattcatccagcaggctctgggctggaacatctatgcctccgtcatcgcgcttctgggcatcaccatgatttacacggtgacaggagggctggccgcgctgatgtacacggacacggtacagaccttcgtcattctggggggcgcctgcatcctcatgggttacgccttccacgaggtgggcgggtattcgggtctcttcgacaaatacctgggagcagcgacttcgctgacggtgtccgaggatccagccgtgggaaacatctccagcttctgctatcgaccccggcccgactcctaccacctgctccggcaccccgtgaccggggatctgccgtggcccgcgctgctcctcggactcacaatcgtctcgggctggtactggtgcagcgaccaggtcatcgtgcagcgctgcctggccgggaagagcctgacccacatcaaggcgggctgcatcctgtgtgggtacctgaagctgacgcccatgtttctcatggtcatgccaggcatgatcagccgcattctgtacccagacgaggtggcgtgcgtggtgcctgaggtgtgcaggcgcgtgtgcggcacggaggtgggctgctccaacatcgcctacccgcggctcgtcgtgaagctcatgcccaacggtctgcgcggactcatgctggcggtcatgctggccgcgctcatgtcctcgctggcctccatcttcaacagcagcagcacgctcttcaccatggacatctacacgcgcctgcggccacgcgccggcgaccgcgagctgctgctggtgggacggctctgggtggtgttcatcgtggtagtgtcggtggcctggcttcccgtggtgcaggcggcacagggcgggcagctcttcgattacatccaggcagtctctagctacctggcaccgcccgtgtccgccgtcttcgtgctggcgctcttcgtgccgcgcgttaatgagcagggcgccttctggggactcatcgggggcctgctgatgggcctggcacgcctgattcccgagttctccttcggctcgggcagctgtgtgcagccctcggcgtgcccagctttcctctgcggcgtgcactacctctacttcgccattgtgctgttcttctgctctggcctcctcaccctcacggtctccctgtgcaccgcgcccatccccagaaagcacctccaccgcctggtcttcagtctccggcatagcaaggaggaacgggaggacctggatgctgatgagcagcaaggctcctcactccctgtacagaatgggtgcccagagagtgccatggagatgaatgagccccaggccccggcaccaagcctcttccgccagtgcctgctctggttttgtggaatgagcagaggtggggtgggcagtcctccgccccttacccaggaggaggcagcggcagcagccaggcggctggaggacatcagcgaggacccgagctgggcccgtgtggtcaacctcaatgccctgctcatgatggcagtggccgtgttcctctggggcttctatgcctaagaccaactgcgttggacaccataagccacagcctcacaggaagtgggggtgaggagcctgcggtgctccccagaaaaggggaaggggcagtggggtgagaaggtcctggctccccttctcccggccttcctctgcctggggcccactgcatctgattggcagtcacttcccatgagggcctggcccacccgctgcagttgccctaaggaaaaataaagctgcctttcccctgtc

SEQ ID NO: 2 - DNA, 2270 bp, Mus musculus
  source 1..2270: mol_type = genomic DNA
agatgctggagagaatggagcaacacgtagaggcaggctctgaacttggggagcagaaggtcctgattgataatcctgctgacattctggttatcgctgcctatttcctgctggtcattggtgttggcttgtggtctatgttcagaaccaatagaggcacagttggtggctacttcctggcaggacggagcatggtgtggtggccggttggagcctctctgttcgccagcaacatcggcagcggtcattttgtgggcctggcagggactggcgcagcaagtggcttggcggtggctggatttgagtggaatgcgctcttcgtggtgctgctcctcggatggctttttgtgccagtgtatctgaccgctggtgtgatcacaatgcctcagtacctccgcaagcgctttggtgggcaccgtattcgcctctacctgtccgtgctctcgctttttttgtacattttcaccaagatctcggtggatatgttctctggggcagtattcattcaacaggccctgggctggaacatttacgcttcggtcatcgctctcttgggcatcaccatgatttatactgtgacaggagggctggcggcactgatgtacacagacactgtgcagaccttcgtcattcttgccggggccttcatcctcactggttatgctttccatgaagtgggcgggtactcgggtctcttcgacaaatacctgggagcaatgacttcactgacggtgtccaaggatccatctgttggcaacatctccagcacctgctaccagccgaggcctgactcctatcacctgctgcgtgaccctgtgacaggagacctgccatggcctgcgctgctcctggggcttaccattgtctcgggctggtattggtgcagcgatcaggtaatagtgcagcggtgcctggctggaaagaatctgactcacatcaaagctgggtgcatcttgtgtggctacctgaagctgatgcccatgttcctcatggtcatgccaggcatgatcagccgcattctctacccagatgaggtggcatgtgtggtacctgaggtgtgtaagcgggtgtgtggcactgaggtgggctgctctaacatcgcctacccacggctcgtggtgaagctcatgcccaatggtctgcgcggactcatgctggcagtcatgctggctgccctcatgtcttctctggcatccatctttaacagcagtagcacgctcttcaccatggatatctacacgcgcctgcggccccgtgcaggtgataaggagctgctgctagttggaaggctctgggtggtattcatcgtggcggtgtccgtggcttggctgccagtggtgcaggcagctcagggtgggcagctcttcgattacattcagtctgtctccagctatctggcacctccagtgtctgcggtctttgtgcttgcactctttgtgccccgtgttaatgagaagggagccttctggggactagttgggggcctgctgatgggcctagctcgtctcatacccgagttcttctttggctcgggcagctgtgtgcgaccctcagcgtgcccggcactcttctgtcgggtacactacctctatttcgccatcattctcttcatctgctctggcatcctcacacttggaatctccctgtgcactgcgcccatccctcagaagcatctccatcgcctggttttcagtctccggcacagcaaggaggagcgggaggacctggatgctgatgagttagaaggtccagcccctgctcctgtgcagaacgggggccaggaatgtgcaatggagatggaagaggtccagtccccggctccaggcctgctccgccggtgcctgctttggttctgtgggatgagcaagagtgggtcagggagtcctccgcccactaccgaggaggtggcggcaaccaccaggcggctggaggacatcagtgaggatccccgctgggcacgagtagtcaacctcaatgccctactcatgatgaccgtggctgtgttcctctggggcttctatgcataaagtcgagggtgttggatgccatgagctacaaccaggccatgttggaccctcacaaagagtaagggtgagcagcttggagtggatcccagaaaaggaacagggcaagaatacagcaggaaggaaccggttcccttcctctttacccggggtccagtccatttgattggttgtcacttcccacaagatgatggccaattggtcatagaggtttgcctatacaaaaataaaactgccctcctaaca

SEQ ID NO: 3 - DNA, 2254 bp, Rattus norvegicus
  source 1..2254: mol_type = genomic DNA
agagaatggagggacacgtagaggaaggctctgaacttggggagcagaaggtcctgattgataatcctgctgacattctggtcattgccgcgtatttcctgctggtcattggtgttggcttgtggtctatgttcagaaccaatagaggcacagttggtggctacttcttggcaggacggagcatggtgtggtggccggttggagcctctctgttcgccagcaacatcggcagcggtcattttgtgggcctggcggggactggtgcagcaagtggcttggccgtggctggatttgagtggaatgcgctctttgtggtgttgctcctcggctggctcttcgtgcctgtgtatctgaccgccggagtgattaccatgcctcagtacctccgcaagcgctttggtgggcgccgtattcgcctctacctgtccgtgctctcgctttttttgtacattttcaccaagatctcggtggatatgttctccggagcagtattcattcaacaggccctgggctggaacatttacgcttctgtcatcgcactcttgggcatcaccatgatttatactgtgacaggagggctggcggcactgatgtacacagacactgtgcagaccttcgtcattcttgccggggccttcatcctcactggttatgctttccatgaagtgggcgggtactcaggtctcttcgacaaatacctgggagcagtgacttcactgacggtgtccaaggatccagctgttggcaacatctccagcacctgctatcagccgaggcccgactcctatcacctgctgcgtgaccctgtgacaggagacctgccgtggcctgcgctgcttctggggcttaccattgtctcaggctggtactggtgcagtgaccaggtaattgtgcagcgctgcctggctggaaagaatctgactcacatcaaggctggatgcatcctgtgtggttacctgaagctgatgcccatgttcctcatggtcatgccaggcatgattagccgcattctttacccagatgaggtggcctgtgtggtacctgaggtgtgtaagcgggtgtgtggcactgaggtgggctgctctaacatcgcctacccacggcttgttgtgaagctcatgcccaatggtctgcgtggactcatgctggcagtcatgctggccgccctcatgtcttctctagcgtccatctttaacagcagcagcacactcttcaccatggatatctacacacgcctgcggcctcgggcgggtgatagggagctgctgctggttggaaggctttgggtggtgttcattgtggcagtgtccgtggcttggctgccagtggtgcaggcagcacagggcggccagctcttcgattacattcagtctgtctccagctacctggcgcctccagtgtccgctgtctttgtgctggcactctttgtgccccgtgttaatgagaagggtgctttctggggactcattgggggcctgctgatgggcctagctcgtctcatacccgagttcttctttggcacgggcagctgtgtgcgaccctctgcatgcccagccatcttctgccgggtacactacctctacttcgccatcattctcttcttctgctccggcttcctcacactcgcaatctccctgtgcaccgcacccatccctcagaagcatctccaccgcctggttttcagtctccggcacagcaaggaggagcgggaggatctggatgctgaagagttagagggtccagcccctcctcctgtgcagaacgggtgccaggaatgtgcaatggggattgaagaggtccagtccccagctccaggcctgctccgccagtgcttgctctggttctgtgggatgagcaagagtgggtcagggagtcctccacccactaccgaggaggtggctgcaaccaccaggcggctagaggacatcagtgaggatcccagctgggcccgagtagtcaacctcaatgccctgctcatgatgactgtggctgtgttcctctggggcttttatgcataaagtcaagtgtgttggttaccatgagttgcaaccagggcatgtctgagcctcatgaaaagtgagggtgaagaacttgtagtggatcccagaaaagggcaaaaatacggcaggaaggaactggttcccttcctctttacctggggtccagtccatttgattggttgtcacttcccacaagatggtggccaatttgtcatagatgtttgcctatgcaaaaataaagctgcccttctaac

SEQ ID NO: 4 - DNA, 2365 bp, Macaca mulatta
  source 1..2365: mol_type = genomic DNA
gggctggtccttggatgggacagatcctggggagaatggaggagcatacagaggcaggctcggcaccagagctgggggcccagagggccctgatcgacaatcctgctgacattctagtcattgctgcatatttcctgctggtcattggtgttggcttgtggtccatgtgcagaaccaacagaggcactgtgggcggctacttcctggcaggacgcagcatgatgtggtggccggttgggacctctctcttcgccagcaacatcggcagtggccactttgtgggcctggcagggactggcgctgcaagtggcttggctgtggctggattcgaatggaatgcgctcttcgtggtgctgctactgggctggctctttgcacccgtgtacctgacggcaggggtcatcacgatgccacagtacctgcgcaagcgcttcggcggccgccgcatccgcctctacctgtctgtgctctcccttttcctgtatatcttcaccaagatctcggtggacatgttctccggagctgtattcatccagcaggctctgggctggaacatctatgcctccgtcatcgcacttctgggcatcaccatgatttacacggtgacaggagggctggccgcgctgatgtacacggacacggtacagaccttcgtcatcctggggggctcctgcatcctcatgggttacgccttccacgaggtgggcgggtattcgggtctcttcgacaaatacctgagagcagcaacttcgctgacggtgtccgaggatccagccgtgggaaacatctccagctcctgctatcgaccccggcccgactcctaccacctgctccggcaccccgtgaccggggatctgccgtggcccgcgctgctcctgggactcacgatcgtctcgggatggtactggtgcagcgaccaggtcattgtgcagcgctgcctggccgggaagagcctgacccacatcaaggcgggctgcatcctgtgcgggtacctgaagctgacgcccatgttcctcatggtcatgccaggaatgatcagccgcattctgtacccggacgaggtggcgtgcgtggtgcctgaggtgtgcaggcgcgtgtgcggcacggaggtgggctgctccaacattgcctacccgcggctcgtcgtgaagctcatgcccaacggtctgcgcggactcatgctggcggtcatgctggccgcgctcatgtcctcgctggcctccatcttcaacagcagcagcacactcttcaccatggacatctacacgcgcctgcggcccagcgccggcgaccgcgagctgctgctggtgggacggctctgggtggtgttcatcgtggtagtgtcggtggcctggcttcccgtggtgcaggcggcgcagggcgggcagctcttcgattacatccaggccgtctccagctacctggcaccgcctgtgtccgccgtcttcgtgctggccctcttcgtgccgcgcgttaatgagcagggcgccttctggggactcatcgggggcctcctgatgggcctggcacgcctgattcccgagttctccttcggctcgggcagctgtgtgcagccctcagcgtgcccagctttcctctgcggcgtgcactacctttacttcgccatcgtgctgttcctctgctccggcctcctcaccctcctggtctcgctgtgcaccgcgcccatcccccgcaagcacctccaccgcctggtcttcagtctccggcacagcaaggaagaacgggaggacctggatgctgatgagcaggaaggctcctcactccctgtacagaatgggtgcccagagcgtgccatggagatggatggtagggcaccatgccggcaggtggggctgggggagctgagttcccgcaaactaactgcagggcctcaatttcccccagagccccaagccccggcaccaagcttcttccgccagtgcctgctctggttttgtggaatgagcaggggtggggtgggcagtcctccgccccttacccaggaggaggcagtggcagcaaccaggcggctggaggacatcagtgaggacccgagctgggcccgtgtggtcaacctcaatgccctgctcatgatggcagtggctgtgttcctctggggcttctatgcctaagaccaactgtgttggataccataagccacagcctcacaggaagtggtggggaggagcctgcggtgctccccaggaaaggggaaggggcagtggggtgagaaggtcctggctctccttctcccagccttcctctgcctggggcccactgcatctgattggcagtcacttcccatgagggcctggcccacccgctgcagttgccctaaggagaaataaagccgcctttcccctgt

SEQ ID NO: 5 - DNA, 2367 bp, Macaca fascicularis
  source 1..2367: mol_type = genomic DNA
aggggctggtccctggatgggacagatcctggggagaatggaggagcacacagaggcaggctcggcaccagagctgggggcccagagggccctgatcgacaatcctgctgacattctagtcattgctgcatatttcctgctggtcattggtgttggcttgtggtccatgtgcagaaccaacagaggcactgtgggcggctacttcctggcaggacgcagcatgatgtggtggccggttggagcctctctcttcgccagcaacatcggcagtggccactttgtgggcctggcagggactggcgctgcaagtggcttggctgtggctggattcgaatggaatgcgctcttcgtggtgctgctactgggctggctctttgcacccgtgtacctgacggcaggggtcatcacgatgccacagtacctgcgcaagcgcttcggcggccgccgcatccgcctctacctgtctgtgctctcccttttcctgtatatcttcaccaagatctcggtggacatgttctccggagctgtattcatccagcaggctctgggctggaacatctatgcctccgtcatcgcacttctgggcatcaccatgatttacacggtgacaggagggctggccgcgctgatgtacacggacacggtacagaccttcgtcatcctggggggctcctgcatcctcatgggttacgccttccacgaggtgggcgggtattcgggtctcttcgacaaatacctgagagcagcaacttcgctgacggtgtccgaggatccagccgtgggaaacatctccagctcctgctatcgaccccggcccgactcctaccacctgctccggcaccccgtgaccggggatctgccgtggcccgcgctgctcctgggactcacgatcgtctcgggatggtactggtgcagcgaccaggtcattgtgcagcgctgcctggccgggaagagcctgacccacatcaaggcgggctgcatcctgtgcgggtacctgaagctgacgcccatgttcctcatggtcatgccaggaatgatcagccgcattctgtacccggacgaggtggcgtgcgtggtgcctgaggtgtgcaggcgcgtgtgcggcacggaggtgggctgctccaacattgcctacccgcggctcgtcgtgaagctcatgcccaacggtctgcgcggactcatgctggcggtcatgctggccgcgctcatgtcctcgctggcctccatcttcaacagcagcagcacactcttcaccatggacatctacacgcgcctgcggcccagcgccggcgaccgcgagctgctgctggtgggacggctctgggtggtgttcatcgtggtagtgtcggtggcctggcttcccgtggtgcaggcggcgcagggcgggcagctcttcgattacatccaggccgtctccagctacctggcaccgcctgtgtccgccgtcttcgtgctggccctcttcgtgccgcgcgttaatgagcagggcgccttctggggactcatcgggggcctcctgatgggcctggcacgcctgattcccgagttctccttcggctcgggcagctgtgtgcagccctcagcgtgcccagctttcctctgcggcgtgcactacctttacttcgccatcgtgctgttcctctgctccggcctcctcaccctcctggtctcgctgtgcaccgcgcccatcccccgcaagcacctccaccgcctggtcttcagtctccggcacagcaaggaagaacgggaggacctggatgctgatgagcaggaaggctcctcactccctgtacagaatgggtgcccagagcgtgccatggagatggatggtagggcaccatgccggcaggtggggctgggggagctgagttcccgcaaactaactgcagggcctcaatttcccccagagccccaagccccggcaccaagcttcttccgccagtgcctgctctggttttgtggaatgagcaggggtggggtgggcagtcctccgccccttacccaggaggaggcagtggcagcaaccaggcggctggaggacatcagtgaggacccgagctgggcccgtgtggtcaacctcaatgccctgctcatgatggcggtggctgtgttcctctggggcttctatgcctaagaccaactgtgttggataccataagccacagcctcacaggaagtggtggggaggagcctgcggtgctccccaggaaaggggaaggggcagtggggtgagaaggtcctggctctccttctcccagccttcctctgcctggggcccactgcatctgattggcagtcacttcccatgagggcctggcccacccgctgcagttgccctaaggagaaataaagccgcctttcccctgt

SEQ ID NO: 6 - DNA, 2267 bp, Homo sapiens
  source 1..2267: mol_type = genomic DNA
gacaggggaaaggcagctttatttttccttagggcaactgcagcgggtgggccaggccctcatgggaagtgactgccaatcagatgcagtgggccccaggcagaggaaggccgggagaaggggagccaggaccttctcaccccactgccccttccccttttctggggagcaccgcaggctcctcacccccacttcctgtgaggctgtggcttatggtgtccaacgcagttggtcttaggcatagaagccccagaggaacacggccactgccatcatgagcagggcattgaggttgaccacacgggcccagctcgggtcctcgctgatgtcctccagccgcctggctgctgccgctgcctcctcctgggtaaggggcggaggactgcccaccccacctctgctcattccacaaaaccagagcaggcactggcggaagaggcttggtgccggggcctggggctcattcatctccatggcactctctgggcacccattctgtacagggagtgaggagccttgctgctcatcagcatccaggtcctcccgttcctccttgctatgccggagactgaagaccaggcggtggaggtgctttctggggatgggcgcggtgcacagggagaccgtgagggtgaggaggccagagcagaagaacagcacaatggcgaagtagaggtagtgcacgccgcagaggaaagctgggcacgccgagggctgcacacagctgcccgagccgaaggagaactcgggaatcaggcgtgccaggcccatcagcaggcccccgatgagtccccagaaggcgccctgctcattaacgcgcggcacgaagagcgccagcacgaagacggcggacacgggcggtgccaggtagctagagactgcctggatgtaatcgaagagctgcccgccctgtgccgcctgcaccacgggaagccaggccaccgacactaccacgatgaacaccacccagagccgtcccaccagcagcagctcgcggtcgccggcgcgtggccgcaggcgcgtgtagatgtccatggtgaagagcgtgctgctgctgttgaagatggaggccagcgaggacatgagcgcggccagcatgaccgccagcatgagtccgcgcagaccgttgggcatgagcttcacgacgagccgcgggtaggcgatgttggagcagcccacctccgtgccgcacacgcgcctgcacacctcaggcaccacgcacgccacctcgtctgggtacagaatgcggctgatcatgcctggcatgaccatgagaaacatgggcgtcagcttcaggtacccacacaggatgcagcccgccttgatgtgggtcaggctcttcccggccaggcagcgctgcacgatgacctggtcgctgcaccagtaccagcccgagacgattgtgagtccgaggagcagcgcgggccacggcagatccccggtcacggggtgccggagcaggtggtaggagtcgggccggggtcgatagcagaagctggagatgtttcccacggctggatcctcggacaccgtcagcgaagtcgctgctcccaggtatttgtcgaagagacccgaatacccgcccacctcgtggaaggcgtaacccatgaggatgcaggcgccccccagaatgacgaaggtctgtaccgtgtccgtgtacatcagcgcggccagccctcctgtcaccgtgtaaatcatggtgatgcccagaagcgcgatgacggaggcatagatgttccagcccagagcctgctggatgaatacagctccggagaacatgtccactgagatcttggtgaagatgtacaggaaaagggagagcacagacaggtagaggcggatgcggcggccgccgaagcgcttgcgcaggtactgtggcatcgtgatgacccccgctgtcaggtacacgggtgcaaacagccagcccagtagcagcaccacgaagagcgcattccactcgaatccagcaacagccaagccacttgcagcgccagtccctgccaggcccacaaagtggccactgccgatgttgctggcgaagagagaggccccaaccggccaccacaccatgctgcgtcctgccaggaagtagccgcccacagtgcctctgttggttctgcacatggaccacaagccaacgccaatgaccagcaggaaatatgcagcaatgactaggatgtcagcaggattgtcaatcagggccttctgggcccccatctctggtgccgagcctgcctctgtgtgctcctccattctccccaggatct

SEQ ID NO: 7 - DNA, 2270 bp, Mus musculus
  source 1..2270: mol_type = genomic DNA
tgttaggagggcagttttatttttgtataggcaaacctctatgaccaattggccatcatcttgtgggaagtgacaaccaatcaaatggactggaccccgggtaaagaggaagggaaccggttccttcctgctgtattcttgccctgttccttttctgggatccactccaagctgctcacccttactctttgtgagggtccaacatggcctggttgtagctcatggcatccaacaccctcgactttatgcatagaagccccagaggaacacagccacggtcatcatgagtagggcattgaggttgactactcgtgcccagcggggatcctcactgatgtcctccagccgcctggtggttgccgccacctcctcggtagtgggcggaggactccctgacccactcttgctcatcccacagaaccaaagcaggcaccggcggagcaggcctggagccggggactggacctcttccatctccattgcacattcctggcccccgttctgcacaggagcaggggctggaccttctaactcatcagcatccaggtcctcccgctcctccttgctgtgccggagactgaaaaccaggcgatggagatgcttctgagggatgggcgcagtgcacagggagattccaagtgtgaggatgccagagcagatgaagagaatgatggcgaaatagaggtagtgtacccgacagaagagtgccgggcacgctgagggtcgcacacagctgcccgagccaaagaagaactcgggtatgagacgagctaggcccatcagcaggcccccaactagtccccagaaggctcccttctcattaacacggggcacaaagagtgcaagcacaaagaccgcagacactggaggtgccagatagctggagacagactgaatgtaatcgaagagctgcccaccctgagctgcctgcaccactggcagccaagccacggacaccgccacgatgaataccacccagagccttccaactagcagcagctccttatcacctgcacggggccgcaggcgcgtgtagatatccatggtgaagagcgtgctactgctgttaaagatggatgccagagaagacatgagggcagccagcatgactgccagcatgagtccgcgcagaccattgggcatgagcttcaccacgagccgtgggtaggcgatgttagagcagcccacctcagtgccacacacccgcttacacacctcaggtaccacacatgccacctcatctgggtagagaatgcggctgatcatgcctggcatgaccatgaggaacatgggcatcagcttcaggtagccacacaagatgcacccagctttgatgtgagtcagattctttccagccaggcaccgctgcactattacctgatcgctgcaccaataccagcccgagacaatggtaagccccaggagcagcgcaggccatggcaggtctcctgtcacagggtcacgcagcaggtgataggagtcaggcctcggctggtagcaggtgctggagatgttgccaacagatggatccttggacaccgtcagtgaagtcattgctcccaggtatttgtcgaagagacccgagtacccgcccacttcatggaaagcataaccagtgaggatgaaggccccggcaagaatgacgaaggtctgcacagtgtctgtgtacatcagtgccgccagccctcctgtcacagtataaatcatggtgatgcccaagagagcgatgaccgaagcgtaaatgttccagcccagggcctgttgaatgaatactgccccagagaacatatccaccgagatcttggtgaaaatgtacaaaaaaagcgagagcacggacaggtagaggcgaatacggtgcccaccaaagcgcttgcggaggtactgaggcattgtgatcacaccagcggtcagatacactggcacaaaaagccatccgaggagcagcaccacgaagagcgcattccactcaaatccagccaccgccaagccacttgctgcgccagtccctgccaggcccacaaaatgaccgctgccgatgttgctggcgaacagagaggctccaaccggccaccacaccatgctccgtcctgccaggaagtagccaccaactgtgcctctattggttctgaacatagaccacaagccaacaccaatgaccagcaggaaataggcagcgataaccagaatgtcagcaggattatcaatcaggaccttctgctccccaagttcagagcctgcctctacgtgttgctccattctctccagcatct

SEQ ID NO: 8 - DNA, 2254 bp, Rattus norvegicus
  source 1..2254: mol_type = genomic DNA
gttagaagggcagctttatttttgcataggcaaacatctatgacaaattggccaccatcttgtgggaagtgacaaccaatcaaatggactggaccccaggtaaagaggaagggaaccagttccttcctgccgtatttttgcccttttctgggatccactacaagttcttcaccctcacttttcatgaggctcagacatgccctggttgcaactcatggtaaccaacacacttgactttatgcataaaagccccagaggaacacagccacagtcatcatgagcagggcattgaggttgactactcgggcccagctgggatcctcactgatgtcctctagccgcctggtggttgcagccacctcctcggtagtgggtggaggactccctgacccactcttgctcatcccacagaaccagagcaagcactggcggagcaggcctggagctggggactggacctcttcaatccccattgcacattcctggcacccgttctgcacaggaggaggggctggaccctctaactcttcagcatccagatcctcccgctcctccttgctgtgccggagactgaaaaccaggcggtggagatgcttctgagggatgggtgcggtgcacagggagattgcgagtgtgaggaagccggagcagaagaagagaatgatggcgaagtagaggtagtgtacccggcagaagatggctgggcatgcagagggtcgcacacagctgcccgtgccaaagaagaactcgggtatgagacgagctaggcccatcagcaggcccccaatgagtccccagaaagcacccttctcattaacacggggcacaaagagtgccagcacaaagacagcggacactggaggcgccaggtagctggagacagactgaatgtaatcgaagagctggccgccctgtgctgcctgcaccactggcagccaagccacggacactgccacaatgaacaccacccaaagccttccaaccagcagcagctccctatcacccgcccgaggccgcaggcgtgtgtagatatccatggtgaagagtgtgctgctgctgttaaagatggacgctagagaagacatgagggcggccagcatgactgccagcatgagtccacgcagaccattgggcatgagcttcacaacaagccgtgggtaggcgatgttagagcagcccacctcagtgccacacacccgcttacacacctcaggtaccacacaggccacctcatctgggtaaagaatgcggctaatcatgcctggcatgaccatgaggaacatgggcatcagcttcaggtaaccacacaggatgcatccagccttgatgtgagtcagattctttccagccaggcagcgctgcacaattacctggtcactgcaccagtaccagcctgagacaatggtaagccccagaagcagcgcaggccacggcaggtctcctgtcacagggtcacgcagcaggtgataggagtcgggcctcggctgatagcaggtgctggagatgttgccaacagctggatccttggacaccgtcagtgaagtcactgctcccaggtatttgtcgaagagacctgagtacccgcccacttcatggaaagcataaccagtgaggatgaaggccccggcaagaatgacgaaggtctgcacagtgtctgtgtacatcagtgccgccagccctcctgtcacagtataaatcatggtgatgcccaagagtgcgatgacagaagcgtaaatgttccagcccagggcctgttgaatgaatactgctccggagaacatatccaccgagatcttggtgaaaatgtacaaaaaaagcgagagcacggacaggtagaggcgaatacggcgcccaccaaagcgcttgcggaggtactgaggcatggtaatcactccggcggtcagatacacaggcacgaagagccagccgaggagcaacaccacaaagagcgcattccactcaaatccagccacggccaagccacttgctgcaccagtccccgccaggcccacaaaatgaccgctgccgatgttgctggcgaacagagaggctccaaccggccaccacaccatgctccgtcctgccaagaagtagccaccaactgtgcctctattggttctgaacatagaccacaagccaacaccaatgaccagcaggaaatacgcggcaatgaccagaatgtcagcaggattatcaatcaggaccttctgctccccaagttcagagccttcctctacgtgtccctccattctct

SEQ ID NO: 9 - DNA, 2365 bp, Macaca mulatta
  source 1..2365: mol_type = genomic DNA
acaggggaaaggcggctttatttctccttagggcaactgcagcgggtgggccaggccctcatgggaagtgactgccaatcagatgcagtgggccccaggcagaggaaggctgggagaaggagagccaggaccttctcaccccactgccccttcccctttcctggggagcaccgcaggctcctccccaccacttcctgtgaggctgtggcttatggtatccaacacagttggtcttaggcatagaagccccagaggaacacagccactgccatcatgagcagggcattgaggttgaccacacgggcccagctcgggtcctcactgatgtcctccagccgcctggttgctgccactgcctcctcctgggtaaggggcggaggactgcccaccccacccctgctcattccacaaaaccagagcaggcactggcggaagaagcttggtgccggggcttggggctctgggggaaattgaggccctgcagttagtttgcgggaactcagctcccccagccccacctgccggcatggtgccctaccatccatctccatggcacgctctgggcacccattctgtacagggagtgaggagccttcctgctcatcagcatccaggtcctcccgttcttccttgctgtgccggagactgaagaccaggcggtggaggtgcttgcgggggatgggcgcggtgcacagcgagaccaggagggtgaggaggccggagcagaggaacagcacgatggcgaagtaaaggtagtgcacgccgcagaggaaagctgggcacgctgagggctgcacacagctgcccgagccgaaggagaactcgggaatcaggcgtgccaggcccatcaggaggcccccgatgagtccccagaaggcgccctgctcattaacgcgcggcacgaagagggccagcacgaagacggcggacacaggcggtgccaggtagctggagacggcctggatgtaatcgaagagctgcccgccctgcgccgcctgcaccacgggaagccaggccaccgacactaccacgatgaacaccacccagagccgtcccaccagcagcagctcgcggtcgccggcgctgggccgcaggcgcgtgtagatgtccatggtgaagagtgtgctgctgctgttgaagatggaggccagcgaggacatgagcgcggccagcatgaccgccagcatgagtccgcgcagaccgttgggcatgagcttcacgacgagccgcgggtaggcaatgttggagcagcccacctccgtgccgcacacgcgcctgcacacctcaggcaccacgcacgccacctcgtccgggtacagaatgcggctgatcattcctggcatgaccatgaggaacatgggcgtcagcttcaggtacccgcacaggatgcagcccgccttgatgtgggtcaggctcttcccggccaggcagcgctgcacaatgacctggtcgctgcaccagtaccatcccgagacgatcgtgagtcccaggagcagcgcgggccacggcagatccccggtcacggggtgccggagcaggtggtaggagtcgggccggggtcgatagcaggagctggagatgtttcccacggctggatcctcggacaccgtcagcgaagttgctgctctcaggtatttgtcgaagagacccgaatacccgcccacctcgtggaaggcgtaacccatgaggatgcaggagccccccaggatgacgaaggtctgtaccgtgtccgtgtacatcagcgcggccagccctcctgtcaccgtgtaaatcatggtgatgcccagaagtgcgatgacggaggcatagatgttccagcccagagcctgctggatgaatacagctccggagaacatgtccaccgagatcttggtgaagatatacaggaaaagggagagcacagacaggtagaggcggatgcggcggccgccgaagcgcttgcgcaggtactgtggcatcgtgatgacccctgccgtcaggtacacgggtgcaaagagccagcccagtagcagcaccacgaagagcgcattccattcgaatccagccacagccaagccacttgcagcgccagtccctgccaggcccacaaagtggccactgccgatgttgctggcgaagagagaggtcccaaccggccaccacatcatgctgcgtcctgccaggaagtagccgcccacagtgcctctgttggttctgcacatggaccacaagccaacaccaatgaccagcaggaaatatgcagcaatgactagaatgtcagcaggattgtcgatcagggccctctgggcccccagctctggtgccgagcctgcctctgtatgctcctccattctccccaggatctgtcccatccaaggaccagccc

SEQ ID NO: 10 - DNA, 2367 bp, Macaca fascicularis
  source 1..2367: mol_type = genomic DNA
acaggggaaaggcggctttatttctccttagggcaactgcagcgggtgggccaggccctcatgggaagtgactgccaatcagatgcagtgggccccaggcagaggaaggctgggagaaggagagccaggaccttctcaccccactgccccttcccctttcctggggagcaccgcaggctcctccccaccacttcctgtgaggctgtggcttatggtatccaacacagttggtcttaggcatagaagccccagaggaacacagccaccgccatcatgagcagggcattgaggttgaccacacgggcccagctcgggtcctcactgatgtcctccagccgcctggttgctgccactgcctcctcctgggtaaggggcggaggactgcccaccccacccctgctcattccacaaaaccagagcaggcactggcggaagaagcttggtgccggggcttggggctctgggggaaattgaggccctgcagttagtttgcgggaactcagctcccccagccccacctgccggcatggtgccctaccatccatctccatggcacgctctgggcacccattctgtacagggagtgaggagccttcctgctcatcagcatccaggtcctcccgttcttccttgctgtgccggagactgaagaccaggcggtggaggtgcttgcgggggatgggcgcggtgcacagcgagaccaggagggtgaggaggccggagcagaggaacagcacgatggcgaagtaaaggtagtgcacgccgcagaggaaagctgggcacgctgagggctgcacacagctgcccgagccgaaggagaactcgggaatcaggcgtgccaggcccatcaggaggcccccgatgagtccccagaaggcgccctgctcattaacgcgcggcacgaagagggccagcacgaagacggcggacacaggcggtgccaggtagctggagacggcctggatgtaatcgaagagctgcccgccctgcgccgcctgcaccacgggaagccaggccaccgacactaccacgatgaacaccacccagagccgtcccaccagcagcagctcgcggtcgccggcgctgggccgcaggcgcgtgtagatgtccatggtgaagagtgtgctgctgctgttgaagatggaggccagcgaggacatgagcgcggccagcatgaccgccagcatgagtccgcgcagaccgttgggcatgagcttcacgacgagccgcgggtaggcaatgttggagcagcccacctccgtgccgcacacgcgcctgcacacctcaggcaccacgcacgccacctcgtccgggtacagaatgcggctgatcattcctggcatgaccatgaggaacatgggcgtcagcttcaggtacccgcacaggatgcagcccgccttgatgtgggtcaggctcttcccggccaggcagcgctgcacaatgacctggtcgctgcaccagtaccatcccgagacgatcgtgagtcccaggagcagcgcgggccacggcagatccccggtcacggggtgccggagcaggtggtaggagtcgggccggggtcgatagcaggagctggagatgtttcccacggctggatcctcggacaccgtcagcgaagttgctgctctcaggtatttgtcgaagagacccgaatacccgcccacctcgtggaaggcgtaacccatgaggatgcaggagccccccaggatgacgaaggtctgtaccgtgtccgtgtacatcagcgcggccagccctcctgtcaccgtgtaaatcatggtgatgcccagaagtgcgatgacggaggcatagatgttccagcccagagcctgctggatgaatacagctccggagaacatgtccaccgagatcttggtgaagatatacaggaaaagggagagcacagacaggtagaggcggatgcggcggccgccgaagcgcttgcgcaggtactgtggcatcgtgatgacccctgccgtcaggtacacgggtgcaaagagccagcccagtagcagcaccacgaagagcgcattccattcgaatccagccacagccaagccacttgcagcgccagtccctgccaggcccacaaagtggccactgccgatgttgctggcgaagagagaggctccaaccggccaccacatcatgctgcgtcctgccaggaagtagccgcccacagtgcctctgttggttctgcacatggaccacaagccaacaccaatgaccagcaggaaatatgcagcaatgactagaatgtcagcaggattgtcgatcagggccctctgggcccccagctctggtgccgagcctgcctctgtgtgctcctccattctccccaggatctgtcccatccagggaccagcccct

SEQ ID NO: 11 - protein, 16 aa, unidentified
  REGION 1..16: note = source = /note="Description of Unknown: RFGF peptide sequence"
AAVALLPAVLLALLAP

SEQ ID NO: 12 - protein, 11 aa, unidentified
  REGION 1..11: note = source = /note="Description of Unknown: RFGF analogue peptide sequence"
AALLPVLLAAP

SEQ ID NO: 13 - protein, 13 aa, Human immunodeficiency virus 1
GRKKRRQRRRPPQ

SEQ ID NO: 14 - protein, 16 aa, Drosophila sp.
RQIKIWFQNRRMKWKK

SEQ ID NO: 15 - DNA, 21 bp, synthetic construct
  source 1..21: mol_type = other DNA
  modified_base 1: mod_base = OTHER; note = 2'-O-methylcytidine-3'-phosphate
  modified_base 2: mod_base = OTHER; note = 2'-O-methyluridine-3'-phosphate
  modified_base 3: mod_base = OTHER; note = 2'-O-methyluridine-3'-phosphate
  modified_base 4: mod_base = OTHER; note = adenosine-3'-phosphate
  modified_base 5: mod_base = OTHER; note = 2'-O-methylcytidine-3'-phosphate
  modified_base 6: mod_base = OTHER; note = guanosine-3'-phosphate
  modified_base 7: mod_base = OTHER; note = 2'-O-methylcytidine-3'-phosphate
  modified_base 8: mod_base = OTHER; note = 2'-O-methyluridine-3'-phosphate
  modified_base 9: mod_base = OTHER; note = guanosine-3'-phosphate
  modified_base 10: mod_base = OTHER; note = adenosine-3'-phosphate
  modified_base 11: mod_base = OTHER; note = guanosine-3'-phosphate
  modified_base 12: mod_base = OTHER; note = 2'-O-methyluridine-3'-phosphate
  modified_base 13: mod_base = OTHER; note = adenosine-3'-phosphate
  modified_base 14: mod_base = OTHER; note = 2'-O-methylcytidine-3'-phosphate
  modified_base 15: mod_base = OTHER; note = 2'-O-methyluridine-3'-phosphate
  modified_base 16: mod_base = OTHER; note = 2'-O-methyluridine-3'-phosphate
  modified_base 17: mod_base = OTHER; note = 2'-O-methylcytidine-3'-phosphate
  modified_base 18: mod_base = OTHER; note = guanosine-3'-phosphate
  modified_base 19: mod_base = OTHER; note = adenosine-3'-phosphate
  modified_base 20: mod_base = OTHER; note = 2'-deoxythymidine-3'-phosphorothioate
  misc_feature 1..19: note = RNA
  misc_feature 20..21: note = DNA
cttacgctgagtacttcgatt

SEQ ID NO: 16 - DNA, 21 bp, synthetic construct
  source 1..21: mol_type = other DNA
  modified_base 1: mod_base = OTHER; note = uridine-3'-phosphate
  modified_base 2: mod_base = OTHER; note = cytidine-3'-phosphate
  modified_base 3: mod_base = OTHER; note = guanosine-3'-phosphate
  modified_base 4: mod_base = OTHER; note = adenosine-3'-phosphate
  modified_base 5: mod_base = OTHER; note = adenosine-3'-phosphate
  modified_base 6: mod_base = OTHER; note = guanosine-3'-phosphate
  modified_base 7: mod_base = OTHER; note = 2'-O-methyluridine-3'-phosphate
  modified_base 8: mod_base = OTHER; note = adenosine-3'-phosphate
  modified_base 9: mod_base = OTHER; note = cytidine-3'-phosphate
  modified_base 10: mod_base = OTHER; note = uridine-3'-phosphate
  modified_base 11: mod_base = OTHER; note = 2'-O-methylcytidine-3'-phosphate
  modified_base 12: mod_base = OTHER; note = adenosine-3'-phosphate
  modified_base 13: mod_base = OTHER; note = guanosine-3'-phosphate
  modified_base 14: mod_base = OTHER; note = cytidine-3'-phosphate
  modified_base 15: mod_base = OTHER; note = guanosine-3'-phosphate
  modified_base 16: mod_base = OTHER; note = 2'-O-methyluridine-3'-phosphate
  modified_base 17: mod_base = OTHER; note = adenosine-3'-phosphate
  modified_base 18: mod_base = OTHER; note = adenosine-3'-phosphate
  modified_base 19: mod_base = OTHER; note = guanosine-3'-phosphate
  modified_base 20: mod_base = OTHER; note = 2'-deoxythymidine-3'-phosphorothioate
  misc_feature 1..19: note = RNA
  misc_feature 20..21: note = DNA
tcgaagtactcagcgtaagtt

SEQ ID NO: 17 - RNA, 21 nt, synthetic construct
  source 1..21: mol_type = other RNA
gagaatggaggagcacacaga

SEQ ID NO: 18 - RNA, 21 nt, synthetic construct
  source 1..21: mol_type = other RNA
ggagcacacagaggcaggcta

SEQ ID NO: 19 - RNA, 21 nt, synthetic construct
  source 1..21: mol_type = other RNA
gcaggctcggcaccagagata

SEQ ID NO: 20 - RNA, 21 nt, synthetic construct
  source 1..21: mol_type = other RNA
cccagaaggccctgattgaca

SEQ ID NO: 21 - RNA, 21 nt, synthetic construct
  source 1..21: mol_type = other RNA
ccctgattgacaatcctgcta

SEQ ID NO: 22 - RNA, 21 nt, synthetic construct
  source 1..21: mol_type = other RNA
acaatcctgctgacatcctaa

SEQ ID NO: 23 - RNA, 21 nt, synthetic construct
  source 1..21: mol_type = other RNA
tgacatcctagtcattgctga

SEQ ID NO: 24 - RNA, 21 nt, synthetic construct
  source 1..21: mol_type = other RNA
gtcattgctgcatatttccta

SEQ ID NO: 25 - RNA, 21 nt, synthetic construct
  source 1..21: mol_type = other RNA
gcatatttcctgctggtcata

SEQ ID NO: 26 - RNA, 21 nt, synthetic construct
  source 1..21: mol_type = other RNA
ctgctggtcattggcgttgga

SEQ ID NO: 27 - RNA, 21 nt, synthetic construct
  source 1..21: mol_type = other RNA
tggcgttggcttgtggtccaa

SEQ ID NO: 28 - RNA, 21 nt, synthetic construct
  source 1..21: mol_type = other RNA
gtccatgtgcagaaccaacaa

SEQ ID NO: 29 - RNA, 21 nt, synthetic construct
  source 1..21: mol_type = other RNA
cagaaccaacagaggcactga

SEQ ID NO: 30 - RNA, 21 nt, synthetic construct
  source 1..21: mol_type = other RNA
agaggcactgtgggcggctaa

SEQ ID NO: 31 - RNA, 21 nt, synthetic construct
  source 1..21: mol_type = other RNA
tgggcggctacttcctggcaa

SEQ ID NO: 32 - RNA, 21 nt, synthetic construct
  source 1..21: mol_type = other RNA
cttcctggcaggacgcagcaa

SEQ ID NO: 33 - RNA, 21 nt, synthetic construct
  source 1..21: mol_type = other RNA
aggacgcagcatggtgtggta

SEQ ID NO: 34 - RNA, 21 nt, synthetic construct
  source 1..21: mol_type = other RNA
cctctctcttcgccagcaaca

SEQ ID NO: 35 - RNA, 21 nt, synthetic construct
  source 1..21: mol_type = other RNA
tcgccagcaacatcggcagta

SEQ ID NO: 36 - RNA, 21 nt, synthetic construct
  source 1..21: mol_type = other RNA
catcggcagtggccactttga

SEQ ID NO: 37 - RNA, 21 nt, synthetic construct
  source 1..21: mol_type = other RNA
tggccactttgtgggcctgga

SEQ ID NO: 38 - RNA, 21 nt, synthetic construct
  source 1..21: mol_type = other RNA
ctgcaagtggcttggctgtta

SEQ ID NO: 39 - RNA, 21 nt, synthetic construct
  source 1..21: mol_type = other RNA
ttggctgttgctggattcgaa

SEQ ID NO: 40 - RNA, 21 nt, synthetic construct
  source 1..21: mol_type = other RNA
cgagtggaatgcgctcttcga

SEQ ID NO: 41 - RNA, 21 nt, synthetic construct
  source 1..21: mol_type = other RNA
gcgctcttcgtggtgctgcta

SEQ ID NO: 42 - RNA, 21 nt, synthetic construct
  source 1..21: mol_type = other RNA
gtggtgctgctactgggctga

SEQ ID NO: 43 - RNA, 21 nt, synthetic construct
  source 1..21: mol_type = other RNA
ctactgggctggctgtttgca

SEQ ID NO: 44 - RNA, 21 nt, synthetic construct
  source 1..21: mol_type = other RNA
tggctgtttgcacccgtgtaa

SEQ ID NO: 45 - RNA, 21 nt, synthetic construct
  source 1..21: mol_type = other RNA
cacccgtgtacctgacagcga

SEQ ID NO: 46 - RNA, 21 nt, synthetic construct
  source 1..21: mol_type = other RNA
gtcatcacgatgccacagtaa

SEQ ID NO: 47 - RNA, 21 nt, synthetic construct
  source 1..21: mol_type = other RNA
atgccacagtacctgcgcaaa

SEQ ID NO: 48 - RNA, 21 nt, synthetic construct
  source 1..21: mol_type = other RNA
tacctgcgcaagcgcttcgga

SEQ ID NO: 49 - RNA, 21 nt, synthetic construct
  source 1..21: mol_type = other RNA
cctctacctgtctgtgctcta

SEQ ID NO: 50 - RNA, 21 nt, synthetic construct
  source 1..21: mol_type = other RNA
tgtgctctcccttttcctgta

SEQ ID NO: 51 - RNA, 21 nt, synthetic construct
  source 1..21: mol_type = other RNA
ccttttcctgtacatcttcaa

SEQ ID NO: 52 - RNA, 21 nt, synthetic construct
  source 1..21: mol_type = other RNA
gtacatcttcaccaagatcta

SEQ ID NO: 53 - RNA, 21 nt, synthetic construct
  source 1..21: mol_type = other RNA
aagatctcagtggacatgtta

SEQ ID NO: 54 - RNA, 21 nt, synthetic construct
  source 1..21: mol_type = other RNA
tggacatgttctccggagcta

SEQ ID NO: 55 - RNA, 21 nt, synthetic construct
  source 1..21: mol_type = other RNA
ccggagctgtattcatccaga

SEQ ID NO: 56 - RNA, 21 nt, synthetic construct
  source 1..21: mol_type = other RNA
atccagcaggctctgggctga

SEQ ID NO: 57 - RNA, 21 nt, synthetic construct
  source 1..21: mol_type = other RNA
gggctggaacatctatgccta

SEQ ID NO: 58 - RNA, 21 nt, synthetic construct
  source 1..21: mol_type = other RNA
cctccgtcatcgcgcttctga

SEQ ID NO: 59 - RNA, 21 nt, synthetic construct
  source 1..21: mol_type = other RNA
cgcgcttctgggcatcaccaa

SEQ ID NO: 60 - RNA, 21 nt, synthetic construct
  source 1..21: mol_type = other RNA
gggcatcaccatgatttacaa

SEQ ID NO: 61 - RNA, 21 nt, synthetic construct
  source 1..21: mol_type = other RNA
catgatttacacggtgacaga

SEQ ID NO: 62 - RNA, 21 nt, synthetic construct
  source 1..21: mol_type = other RNA
cacggtgacaggagggctgga

SEQ ID NO: 63 - RNA, 21 nt, synthetic construct
  source 1..21: mol_type = other RNA
cgcgctgatgtacacggacaa

SEQ ID NO: 64 - RNA, 21 nt, synthetic construct
  source 1..21: mol_type = other RNA
acggacacggtacagacctta

SEQ ID NO: 65 - RNA, 21 nt, synthetic construct
  source 1..21: mol_type = other RNA
gtacagaccttcgtcattcta

SEQ ID NO: 66 - RNA, 21 nt, synthetic construct
  source 1..21: mol_type = other RNA
gcctgcatcctcatgggttaa

SEQ ID NO: 67 - RNA, 21 nt, synthetic construct
  source 1..21: mol_type = other RNA
ctcatgggttacgccttccaa

SEQ ID NO: 68 - RNA, 21 nt, synthetic construct
  source 1..21: mol_type = other RNA
tacgccttccacgaggtggga

SEQ ID NO: 69 - RNA, 21 nt, synthetic construct
  source 1..21: mol_type = other RNA
cacgaggtgggcgggtattca

SEQ ID NO: 70 - RNA, 21 nt, synthetic construct
  source 1..21: mol_type = other RNA
cgggtattcgggtctcttcga

SEQ ID NO: 71 - RNA, 21 nt, synthetic construct
  source 1..21: mol_type = other RNA
ggtctcttcgacaaataccta

SEQ ID NO: 72 - RNA, 21 nt, synthetic construct
  source 1..21: mol_type = other RNA
cctgggagcagcgacttcgca

SEQ ID NO: 73 - RNA, 21 nt, synthetic construct
  source 1..21: mol_type = other RNA
agcgacttcgctgacggtgta

SEQ ID NO: 74 - RNA, 21 nt, synthetic construct
  source 1..21: mol_type = other RNA
tgacggtgtccgaggatccaa

SEQ ID NO: 75 - RNA, 21 nt, synthetic construct
  source 1..21: mol_type = other RNA
tccagccgtgggaaacatcta

SEQ ID NO: 76 - RNA, 21 nt, synthetic construct
  source 1..21: mol_type = other RNA
gggaaacatctccagcttcta

SEQ ID NO: 77 - RNA, 21 nt, synthetic construct
  source 1..21: mol_type = other RNA
ctccagcttctgctatcgaca

SEQ ID NO: 78 - RNA, 21 nt, synthetic construct
  source 1..21: mol_type = other RNA
tcctaccacctgctccggcaa

SEQ ID NO: 79 - RNA, 21 nt, synthetic construct
  source 1..21: mol_type = other RNA
tcggactcacaatcgtctcga

SEQ ID NO: 80 - RNA, 21 nt, synthetic construct
  source 1..21: mol_type = other RNA
ctcgggctggtactggtgcaa

SEQ ID NO: 81 - RNA, 21 nt, synthetic construct
  source 1..21: mol_type = other RNA
gtgcagcgaccaggtcatcga

SEQ ID NO: 82 - RNA, 21 nt, synthetic construct
  source 1..21: mol_type = other RNA
ccaggtcatcgtgcagcgcta

SEQ ID NO: 83 - RNA, 21 nt, synthetic construct
  source 1..21: mol_type = other RNA
gggaagagcctgacccacata

SEQ ID NO: 84 - RNA, 21 nt, synthetic construct
  source 1..21: mol_type = other RNA
gacccacatcaaggcgggcta

SEQ ID NO: 85 - RNA, 21 nt, synthetic construct
  source 1..21: mol_type = other RNA
gctgcatcctgtgtgggtaca

SEQ ID NO: 86 - RNA, 21 nt, synthetic construct
  source 1..21: mol_type = other RNA
tacctgaagctgacgcccata

SEQ ID NO: 87 - RNA, 21 nt, synthetic construct
  source 1..21: mol_type = other RNA
gcccatgtttctcatggtcaa

SEQ ID NO: 88 - RNA, 21 nt, synthetic construct
  source 1..21: mol_type = other RNA
gtcatgccaggcatgatcaga

SEQ ID NO: 89 - RNA, 21 nt, synthetic construct
  source 1..21: mol_type = other RNA
ggcatgatcagccgcattcta

SEQ ID NO: 90 - RNA, 21 nt, synthetic construct
  source 1..21: mol_type = other RNA
agccgcattctgtacccagaa

SEQ ID NO: 91 - RNA, 21 nt, synthetic construct
  source 1..21: mol_type = other RNA
gtacccagacgaggtggcgta

SEQ ID NO: 92 - RNA, 21 nt, synthetic construct
  source 1..21: mol_type = other RNA
aggtgggctgctccaacatca

SEQ ID NO: 93 - RNA, 21 nt, synthetic construct
  source 1..21: mol_type = other RNA
gctccaacatcgcctacccga

SEQ ID NO: 94 - RNA, 21 nt, synthetic construct
  source 1..21: mol_type = other RNA
ctcgtcgtgaagctcatgcca

SEQ ID NO: 95 - RNA, 21 nt, synthetic construct
  source 1..21: mol_type = other RNA
aagctcatgcccaacggtcta

SEQ ID NO: 96 - RNA, 21 nt, synthetic construct
  source 1..21: mol_type = other RNA
ggtctgcgcggactcatgcta

SEQ ID NO: 97 - RNA, 21 nt, synthetic construct
  source 1..21: mol_type = other RNA
ggactcatgctggcggtcata

SEQ ID NO: 98 - RNA, 21 nt, synthetic construct
  source 1..21: mol_type = other RNA
gctggccgcgctcatgtccta

SEQ ID NO: 99 - RNA, 21 nt, synthetic construct
  source 1..21: mol_type = other RNA
gtcctcgctggcctccatcta

SEQ ID NO: 100 - RNA, 21 nt, synthetic construct
  source 1..21: mol_type = other RNA
ggcctccatcttcaacagcaa

SEQ ID NO: 101 - RNA, 21 nt, synthetic construct
  source 1..21: mol_type = other RNA
cttcaacagcagcagcacgca

SEQ ID NO: 102 - RNA, 21 nt, synthetic construct
  source 1..21: mol_type = other RNA
cagcagcacgctcttcaccaa

SEQ ID NO: 103 - RNA, 21 nt, synthetic construct
  source 1..21: mol_type = other RNA
gctcttcaccatggacatcta

SEQ ID NO: 104 - RNA, 21 nt, synthetic construct
  source 1..21: mol_type = other RNA
atggacatctacacgcgccta

SEQ ID NO: 105 - RNA, 21 nt, synthetic construct
  source 1..21: mol_type = other RNA
gctctgggtggtgttcatcga

SEQ ID NO: 106 - RNA, 21 nt, synthetic construct
  source 1..21: mol_type = other RNA
ggtgttcatcgtggtagtgta

SEQ ID NO: 107 - RNA, 21 nt, synthetic construct
  source 1..21: mol_type = other RNA
cgtggtagtgtcggtggccta

SEQ ID NO: 108 - RNA, 21 nt, synthetic construct
  source 1..21: mol_type = other RNA
cagctcttcgattacatccaa

SEQ ID NO: 109 - RNA, 21 nt, synthetic construct
  source 1..21: mol_type = other RNA
attacatccaggcagtctcta

SEQ ID NO: 110 - RNA, 21 nt, synthetic construct
  source 1..21: mol_type = other RNA
aggcagtctctagctacctga

SEQ ID NO: 111 - RNA, 21 nt, synthetic construct
  source 1..21: mol_type = other RNA
ttcgtgctggcgctcttcgta

SEQ ID NO: 112 - RNA, 21 nt, synthetic construct
  source 1..21: mol_type = other RNA
tgccgcgcgttaatgagcaga

SEQ ID NO: 113 - RNA, 21 nt, synthetic construct
  source 1..21: mol_type = other RNA
gggcctggcacgcctgattca

SEQ ID NO: 114 - RNA, 21 nt, synthetic construct
  source 1..21: mol_type = other RNA
cgcctgattcccgagttctca

SEQ ID NO: 115 - RNA, 21 nt, synthetic construct
  source 1..21: mol_type = other RNA
cccgagttctccttcggctca

SEQ ID NO: 116 - RNA, 21 nt, synthetic construct
  source 1..21: mol_type = other RNA
ggcgtgcccagctttcctcta

SEQ ID NO: 117 - RNA, 21 nt, synthetic construct
  source 1..21: mol_type = other RNA
tttcctctgcggcgtgcacta

SEQ ID NO: 118 - RNA, 21 nt, synthetic construct
  source 1..21: mol_type = other RNA
cggcgtgcactacctctacta

SEQ ID NO: 119 - RNA, 21 nt, synthetic construct
  source 1..21: mol_type = other RNA
ctacctctacttcgccattga

SEQ ID NO: 120 - RNA, 21 nt, synthetic construct
  source 1..21: mol_type = other RNA
gccattgtgctgttcttctga

SEQ ID NO: 121 - RNA, 21 nt, synthetic construct
  source 1..21: mol_type = other RNA
ctgttcttctgctctggccta

SEQ ID NO: 122 - RNA, 21 nt, synthetic construct
  source 1..21: mol_type = other RNA
ctctggcctcctcaccctcaa

SEQ ID NO: 123 - RNA, 21 nt, synthetic construct
  source 1..21: mol_type = other RNA
ctcaccctcacggtctcccta

SEQ ID NO: 124 - RNA, 21 nt, synthetic construct
  source 1..21: mol_type = other RNA
cacctccaccgcctggtctta

SEQ ID NO: 125 - RNA, 21 nt, synthetic construct
  source 1..21: mol_type = other RNA
cgcctggtcttcagtctccga

SEQ ID NO: 126 - RNA, 21 nt, synthetic construct
  source 1..21: mol_type = other RNA
tccggcatagcaaggaggaaa

SEQ ID NO: 127 - RNA, 21 nt, synthetic construct
  source 1..21: mol_type = other RNA
aaggaggaacgggaggaccta

SEQ ID NO: 128 - RNA, 21 nt, synthetic construct
  source 1..21: mol_type = other RNA
cgggaggacctggatgctgaa

SEQ ID NO: 129 - RNA, 21 nt, synthetic construct
  source 1..21: mol_type = other RNA
ctggatgctgatgagcagcaa

SEQ ID NO: 130 - RNA, 21 nt, synthetic construct
  source 1..21: mol_type = other RNA
gatgagcagcaaggctcctca

SEQ ID NO: 131 - RNA, 21 nt, synthetic construct
  source 1..21: mol_type = other RNA
caaggctcctcactccctgta

SEQ ID NO: 132 - RNA, 21 nt, synthetic construct
  source 1..21: mol_type = other RNA
ctccctgtacagaatgggtga

SEQ ID NO: 133 - RNA, 21 nt, synthetic construct
  source 1..21: mol_type = other RNA
tgcccagagagtgccatggaa

SEQ ID NO: 134 - RNA, 21 nt, synthetic construct
  source 1..21: mol_type = other RNA
gccatggagatgaatgagcca

SEQ ID NO: 135 - RNA, 21 nt, synthetic construct
  source 1..21: mol_type = other RNA
accaagcctcttccgccagta

SEQ ID NO: 136 - RNA, 21 nt, synthetic construct
  source 1..21: mol_type = other RNA
cagtgcctgctctggttttga

SEQ ID NO: 137 - RNA, 21 nt, synthetic construct
  source 1..21: mol_type = other RNA
ctggttttgtggaatgagcaa

SEQ ID NO: 138 - RNA, 21 nt, synthetic construct
  source 1..21: mol_type = other RNA
ctggaggacatcagcgaggaa

SEQ ID NO: 139 - RNA, 21 nt, synthetic construct
  source 1..21: mol_type = other RNA
atcagcgaggacccgagctga

SEQ ID NO: 140 - RNA, 21 nt, synthetic construct
  source 1..21: mol_type = other RNA
cgtgtggtcaacctcaatgca

SEQ ID NO: 141 - RNA, 21 nt, synthetic construct
  source 1..21: mol_type = other RNA
aacctcaatgccctgctcata

SEQ ID NO: 142 - RNA, 21 nt, synthetic construct
  source 1..21: mol_type = other RNA
cctgctcatgatggcagtgga

SEQ ID NO: 143 - RNA, 21 nt, synthetic construct
  source 1..21: mol_type = other RNA
gcagtggccgtgttcctctga

SEQ ID NO: 144 - RNA, 21 nt, synthetic construct
  source 1..21: mol_type = other RNA
tctatgcctaagaccaactga

SEQ ID NO: 145 - RNA, 21 nt, synthetic construct
  source 1..21: mol_type = other RNA
aagaccaactgcgttggacaa

SEQ ID NO: 146 - RNA, 21 nt, synthetic construct
  source 1..21: mol_type = other RNA
gcgttggacaccataagccaa

SEQ ID NO: 147 - RNA, 21 nt, synthetic construct
  source 1..21: mol_type = other RNA
ccacagcctcacaggaagtga

SEQ ID NO: 148 - RNA, 21 nt, synthetic construct
  source 1..21: mol_type = other RNA
ctcccggccttcctctgccta

SEQ ID NO: 149 - RNA, 21 nt, synthetic construct
  source 1..21: mol_type = other RNA
ccactgcatctgattggcaga

SEQ ID NO: 150 - RNA, 21 nt, synthetic construct
  source 1..21: mol_type = other RNA
gcagtcacttcccatgaggga

SEQ ID NO: 151 - RNA, 21 nt, synthetic construct
  source 1..21: mol_type = other RNA
ctgcagttgccctaaggaaaa

SEQ ID NO: 152 - RNA, 23 nt, synthetic construct
  source 1..23: mol_type = other RNA
tctgtgtgctcctccattctccc

SEQ ID NO: 153 - RNA, 23 nt, synthetic construct
  source 1..23: mol_type = other RNA
tagcctgcctctgtgtgctcctc

SEQ ID NO: 154 - RNA, 23 nt, synthetic construct
  source 1..23: mol_type = other RNA
tatctctggtgccgagcctgcct

SEQ ID NO: 155 - RNA, 23 nt, synthetic construct
  source 1..23: mol_type = other RNA
tgtcaatcagggccttctgggcc

SEQ ID NO: 156 - RNA, 23 nt, synthetic construct
  source 1..23: mol_type = other RNA
tagcaggattgtcaatcagggcc

SEQ ID NO: 157 - RNA, 23 nt, synthetic construct
  source 1..23: mol_type = other RNA
ttaggatgtcagcaggattgtca

SEQ ID NO: 158 - RNA, 23 nt, synthetic construct
  source 1..23: mol_type = other RNA
tcagcaatgactaggatgtcagc

SEQ ID NO: 159 - RNA, 23 nt, synthetic construct
  source 1..23: mol_type = other RNA
taggaaatatgcagcaatgacta

SEQ ID NO: 160 - RNA, 23 nt, synthetic construct
  source 1..23: mol_type = other RNA
tatgaccagcaggaaatatgcag

SEQ ID NO: 161 - RNA, 23 nt, synthetic construct
  source 1..23: mol_type = other RNA
tccaacgccaatgaccagcagga

SEQ ID NO: 162 - RNA, 23 nt, synthetic construct
  source 1..23: mol_type = other RNA
ttggaccacaagccaacgccaat

SEQ ID NO: 163 - RNA, 23 nt, synthetic construct
  source 1..23: mol_type = other RNA
ttgttggttctgcacatggacca

SEQ ID NO: 164 - RNA, 23 nt, synthetic construct
  source 1..23: mol_type = other RNA
tcagtgcctctgttggttctgca

SEQ ID NO: 165 - RNA, 23 nt, synthetic construct
  source 1..23: mol_type = other RNA
ttagccgcccacagtgcctctgt

SEQ ID NO: 166 - RNA, 23 nt, synthetic construct
  source 1..23: mol_type = other RNA
ttgccaggaagtagccgcccaca

SEQ ID NO: 167 - RNA, 23 nt, synthetic construct
  source 1..23: mol_type = other RNA
ttgctgcgtcctgccaggaagta

SEQ ID NO: 168 - RNA, 23 nt, synthetic construct
  source 1..23: mol_type = other RNA
taccacaccatgctgcgtcctgc

SEQ ID NO: 169 - RNA, 23 nt, synthetic construct
  source 1..23: mol_type = other RNA
tgttgctggcgaagagagaggcc

SEQ ID NO: 170 - RNA, 23 nt, synthetic construct
  source 1..23: mol_type = other RNA
tactgccgatgttgctggcgaag

SEQ ID NO: 171 - RNA, 23 nt, synthetic construct
  source 1..23: mol_type = other RNA
tcaaagtggccactgccgatgtt

SEQ ID NO: 172 - RNA, 23 nt, synthetic construct
  source 1..23: mol_type = other RNA
tccaggcccacaaagtggccact

SEQ ID NO: 173 - RNA, 23 nt, synthetic construct
  source 1..23: mol_type = other RNA
taacagccaagccacttgcagcg

SEQ ID NO: 174 - RNA, 23 nt, synthetic construct
  source 1..23: mol_type = other RNA
ttcgaatccagcaacagccaagc

SEQ ID NO: 175 - RNA, 23 nt, synthetic construct
  source 1..23: mol_type = other RNA
tcgaagagcgcattccactcgaa

SEQ ID NO: 176 - RNA, 23 nt, synthetic construct
  source 1..23: mol_type = other RNA
tagcagcaccacgaagagcgcat

SEQ ID NO: 177 - RNA, 23 nt, synthetic construct
  source 1..23: mol_type = other RNA
tcagcccagtagcagcaccacga

SEQ ID NO: 178 - RNA, 23 nt, synthetic construct
  source 1..23: mol_type = other RNA
tgcaaacagccagcccagtagca

SEQ ID NO: 179 - RNA, 23 nt, synthetic construct
  source 1..23: mol_type = other RNA
ttacacgggtgcaaacagccagc

SEQ ID NO: 180 - RNA, 23 nt, synthetic construct
  source 1..23: mol_type = other RNA
tcgctgtcaggtacacgggtgca

SEQ ID NO: 181 - RNA, 23 nt, synthetic construct
  source 1..23: mol_type = other RNA
ttactgtggcatcgtgatgaccc

SEQ ID NO: 182 - RNA, 23 nt, synthetic construct
  source 1..23: mol_type = other RNA
tttgcgcaggtactgtggcatcg

SEQ ID NO: 183 - RNA, 23 nt, synthetic construct
  source 1..23: mol_type = other RNA
tccgaagcgcttgcgcaggtact

SEQ ID NO: 184 - RNA, 23 nt, synthetic construct
  source 1..23: mol_type = other RNA
tagagcacagacaggtagaggcg

SEQ ID NO: 185 - RNA, 23 nt, synthetic construct
  source 1..23: mol_type = other RNA
tacaggaaaagggagagcacaga

SEQ ID NO: 186 - RNA, 23 nt, synthetic construct
  source 1..23: mol_type = other RNA
ttgaagatgtacaggaaaaggga

SEQ ID NO: 187 - RNA, 23 nt, synthetic construct
  source 1..23: mol_type = other RNA
tagatcttggtgaagatgtacag

SEQ ID NO: 188 - RNA, 23 nt, synthetic construct
  source 1..23: mol_type = other RNA
taacatgtccactgagatcttgg

SEQ ID NO: 189 - RNA, 23 nt, synthetic construct
  source 1..23: mol_type = other RNA
tagctccggagaacatgtccact

SEQ ID NO: 190 - RNA, 23 nt, synthetic construct
  source 1..23: mol_type = other RNA
tctggatgaatacagctccggag

SEQ ID NO: 191 - RNA, 23 nt, synthetic construct
  source 1..23: mol_type = other RNA
tcagcccagagcctgctggatga

SEQ ID NO: 192 - RNA, 23 nt, synthetic construct
  source 1..23: mol_type = other RNA
taggcatagatgttccagcccag

SEQ ID NO: 193 - RNA, 23 nt, synthetic construct
  source 1..23: mol_type = other RNA
tcagaagcgcgatgacggaggca

SEQ ID NO: 194 - RNA, 23 nt, synthetic construct
  source 1..23: mol_type = other RNA
ttggtgatgcccagaagcgcgat

SEQ ID NO: 195 - RNA, 23 nt, synthetic construct
  source 1..23: mol_type = other RNA
ttgtaaatcatggtgatgcccag

SEQ ID NO: 196 - RNA, 23 nt, synthetic construct
  source 1..23: mol_type = other RNA
tctgtcaccgtgtaaatcatggt

SEQ ID NO: 197 - RNA, 23 nt, synthetic construct
  source 1..23: mol_type = other RNA
tccagccctcctgtcaccgtgta

SEQ ID NO: 198 - RNA, 23 nt, synthetic construct
  source 1..23: mol_type = other RNA
ttgtccgtgtacatcagcgcggc

SEQ ID NO: 199 - RNA, 23 nt, synthetic construct
  source 1..23: mol_type = other RNA
taaggtctgtaccgtgtccgtgt

SEQ ID NO: 200 - RNA, 23 nt, synthetic construct
  source 1..23: mol_type = other RNA
tagaatgacgaaggtctgtaccg

SEQ ID NO: 201 - RNA, 23 nt, synthetic construct
  source 1..23: mol_type = other RNA
ttaacccatgaggatgcaggcgc

SEQ ID NO: 202 - RNA, 23 nt, synthetic construct
  source 1..23: mol_type = other RNA
ttggaaggcgtaacccatgagga

SEQ ID NO: 203 - RNA, 23 nt, synthetic construct
  source 1..23: mol_type = other RNA
tcccacctcgtggaaggcgtaac

SEQ ID NO: 204 - RNA, 23 nt, synthetic construct
  source 1..23: mol_type = other RNA
tgaatacccgcccacctcgtgga

SEQ ID NO: 205 - RNA, 23 nt, synthetic construct
  source 1..23: mol_type = other RNA
tcgaagagacccgaatacccgcc

SEQ ID NO: 206 - RNA, 23 nt, synthetic construct
  source 1..23: mol_type = other RNA
taggtatttgtcgaagagacccg

SEQ ID NO: 207 - RNA, 23 nt, synthetic construct
  source 1..23: mol_type = other RNA
tgcgaagtcgctgctcccaggta

SEQ ID NO: 208 - RNA, 23 nt, synthetic construct
  source 1..23: mol_type = other RNA
tacaccgtcagcgaagtcgctgc

SEQ ID NO: 209 - RNA, 23 nt, synthetic construct
  source 1..23: mol_type = other RNA
ttggatcctcggacaccgtcagc

SEQ ID NO: 210 - RNA, 23 nt, synthetic construct
  source 1..23: mol_type = other RNA
tagatgtttcccacggctggatc

SEQ ID NO: 211 - RNA, 23 nt, synthetic construct
  source 1..23: mol_type = other RNA
tagaagctggagatgtttcccac

SEQ ID NO: 212 - RNA, 23 nt, synthetic construct
  source 1..23: mol_type = other RNA
tgtcgatagcagaagctggagat

SEQ ID NO: 213 - RNA, 23 nt, synthetic construct
  source 1..23: mol_type = other RNA
ttgccggagcaggtggtaggagt

SEQ ID NO: 214 - RNA, 23 nt, synthetic construct
  source 1..23: mol_type = other RNA
tcgagacgattgtgagtccgagg

SEQ ID NO: 215 - RNA, 23 nt, synthetic construct
  source 1..23: mol_type = other RNA
ttgcaccagtaccagcccgagac

SEQ ID NO: 216 - RNA, 23 nt, synthetic construct
  source 1..23: mol_type = other RNA
tcgatgacctggtcgctgcacca

SEQ ID NO: 217 - RNA, 23 nt, synthetic construct
  source 1..23: mol_type = other RNA
tagcgctgcacgatgacctggtc

SEQ ID NO: 218 - RNA, 23 nt, synthetic construct
  source 1..23: mol_type = other RNA
tatgtgggtcaggctcttcccgg

SEQ ID NO: 219 - RNA, 23 nt, synthetic construct
  source 1..23: mol_type = other RNA
tagcccgccttgatgtgggtcag

SEQ ID NO: 220 - RNA, 23 nt, synthetic construct
  source 1..23: mol_type = other RNA
tgtacccacacaggatgcagccc

SEQ ID NO: 221 - RNA, 23 nt, synthetic construct
  source 1..23: mol_type = other RNA
tatgggcgtcagcttcaggtacc

SEQ ID NO: 222 - RNA, 23 nt, synthetic construct
  source 1..23: mol_type = other RNA
ttgaccatgagaaacatgggcgt

SEQ ID NO: 223 - RNA, 23 nt, synthetic construct
  source 1..23: mol_type = other RNA
tctgatcatgcctggcatgacca

SEQ ID NO: 224 - RNA, 23 nt, synthetic construct
  source 1..23: mol_type = other RNA
tagaatgcggctgatcatgcctg

SEQ ID NO: 225 - RNA, 23 nt, synthetic construct
  source 1..23: mol_type = other RNA
ttctgggtacagaatgcggctga

SEQ ID NO: 226 - RNA, 23 nt, synthetic construct
  source 1..23: mol_type = other RNA
tacgccacctcgtctgggtacag

SEQ ID NO: 227 - RNA, 23 nt, synthetic construct
  source 1..23: mol_type = other RNA
tgatgttggagcagcccacctcc

SEQ ID NO: 228 - RNA, 23 nt, synthetic construct
  source 1..23: mol_type = other RNA
tcgggtaggcgatgttggagcag

SEQ ID NO: 229 - RNA, 23 nt, synthetic construct
  source 1..23: mol_type = other RNA
tggcatgagcttcacgacgagcc

SEQ ID NO: 230 - RNA, 23 nt, synthetic construct
  source 1..23: mol_type = other RNA
tagaccgttgggcatgagcttca

SEQ ID NO: 231 - RNA, 23 nt, synthetic construct
  source 1..23: mol_type = other RNA
tagcatgagtccgcgcagaccgt

SEQ ID NO: 232 - RNA, 23 nt, synthetic construct
  source 1..23: mol_type = other RNA
tatgaccgccagcatgagtccgc

SEQ ID NO: 233 - RNA, 23 nt, synthetic construct
  source 1..23: mol_type = other RNA
taggacatgagcgcggccagcat

SEQ ID NO: 234 - RNA, 23 nt, synthetic construct
  source 1..23: mol_type = other RNA
tagatggaggccagcgaggacat

SEQ ID NO: 235 - RNA, 23 nt, synthetic construct
  source 1..23: mol_type = other RNA
ttgctgttgaagatggaggccag

SEQ ID NO: 236 - RNA, 23 nt, synthetic construct
  source 1..23: mol_type = other RNA
tgcgtgctgctgctgttgaagat

SEQ ID NO: 237 - RNA, 23 nt, synthetic construct
  source 1..23: mol_type = other RNA
ttggtgaagagcgtgctgctgct

SEQ ID NO: 238 - RNA, 23 nt, synthetic construct
  source 1..23: mol_type = other RNA
tagatgtccatggtgaagagcgt

SEQ ID NO: 239 - RNA, 23 nt, synthetic construct
  source 1..23: mol_type = other RNA
taggcgcgtgtagatgtccatgg

SEQ ID NO: 240 - RNA, 23 nt, synthetic construct
  source 1..23: mol_type = other RNA
tcgatgaacaccacccagagccg

SEQ ID NO: 241 - RNA, 23 nt, synthetic construct
  source 1..23: mol_type = other RNA
tacactaccacgatgaacaccac

SEQ ID NO: 242 - RNA, 23 nt, synthetic construct
  source 1..23: mol_type = other RNA
taggccaccgacactaccacgat

SEQ ID NO: 243 - RNA, 23 nt, synthetic construct
  source 1..23: mol_type = other RNA
ttggatgtaatcgaagagctgcc

SEQ ID NO: 244 - RNA, 23 nt, synthetic construct
  source 1..23: mol_type = other RNA
tagagactgcctggatgtaatcg

SEQ ID NO: 245 - RNA, 23 nt, synthetic construct
  source 1..23: mol_type = other RNA
tcaggtagctagagactgcctgg

SEQ ID NO: 246 - RNA, 23 nt, synthetic construct
  source 1..23: mol_type = other RNA
tacgaagagcgccagcacgaaga

SEQ ID NO: 247 - RNA, 23 nt, synthetic construct
  source 1..23: mol_type = other RNA
tctgctcattaacgcgcggcacg

SEQ ID NO: 248 - RNA, 23 nt, synthetic construct
  source 1..23: mol_type = other RNA
tgaatcaggcgtgccaggcccat

SEQ ID NO: 249 - RNA, 23 nt, synthetic construct
  source 1..23: mol_type = other RNA
tgagaactcgggaatcaggcgtg

SEQ ID NO: 250 - RNA, 23 nt, synthetic construct
  source 1..23: mol_type = other RNA
tgagccgaaggagaactcgggaa

SEQ ID NO: 251 - RNA, 23 nt, synthetic construct
  source 1..23: mol_type = other RNA
tagaggaaagctgggcacgccga

SEQ ID NO: 252 - RNA, 23 nt, synthetic construct
  source 1..23: mol_type = other RNA
tagtgcacgccgcagaggaaagc

SEQ ID NO: 253 - RNA, 23 nt, synthetic construct
  source 1..23: mol_type = other RNA
tagtagaggtagtgcacgccgca

SEQ ID NO: 254 - RNA, 23 nt, synthetic construct
  source 1..23: mol_type = other RNA
tcaatggcgaagtagaggtagtg

SEQ ID NO: 255 - RNA, 23 nt, synthetic construct
  source 1..23: mol_type = other RNA
tcagaagaacagcacaatggcga

SEQ ID NO: 256 - RNA, 23 nt, synthetic construct
  source 1..23: mol_type = other RNA
taggccagagcagaagaacagca

SEQ ID NO: 257 - RNA, 23 nt, synthetic construct
  source 1..23: mol_type = other RNA
ttgagggtgaggaggccagagca

SEQ ID NO: 258 - RNA, 23 nt, synthetic construct
  source 1..23: mol_type = other RNA
tagggagaccgtgagggtgagga

SEQ ID NO: 259 - RNA, 23 nt, synthetic construct
  source 1..23: mol_type = other RNA
taagaccaggcggtggaggtgct

SEQ ID NO: 260 - RNA, 23 nt, synthetic construct
  source 1..23: mol_type = other RNA
tcggagactgaagaccaggcggt

SEQ ID NO: 261 - RNA, 23 nt, synthetic construct
  source 1..23: mol_type = other RNA
tttcctccttgctatgccggaga

SEQ ID NO: 262 - RNA, 23 nt, synthetic construct
  source 1..23: mol_type = other RNA
taggtcctcccgttcctccttgc

SEQ ID NO: 263 - RNA, 23 nt, synthetic construct
  source 1..23: mol_type = other RNA
ttcagcatccaggtcctcccgtt

SEQ ID NO: 264 - RNA, 23 nt, synthetic construct
  source 1..23: mol_type = other RNA
ttgctgctcatcagcatccaggt

SEQ ID NO: 265 - RNA, 23 nt, synthetic construct
  source 1..23: mol_type = other RNA
tgaggagccttgctgctcatcag

SEQ ID NO: 266 - RNA, 23 nt, synthetic construct
  source 1..23: mol_type = other RNA
tacagggagtgaggagccttgct

SEQ ID NO: 267 - RNA, 23 nt, synthetic construct
  source 1..23: mol_type = other RNA
tcacccattctgtacagggagtg

SEQ ID NO: 268 - RNA, 23 nt, synthetic construct
  source 1..23: mol_type = other RNA
ttccatggcactctctgggcacc

SEQ ID NO: 269 - RNA, 23 nt, synthetic construct
  source 1..23: mol_type = other RNA
tggctcattcatctccatggcac

SEQ ID NO: 270 - RNA, 23 nt, synthetic construct
  source 1..23: mol_type = other RNA
tactggcggaagaggcttggtgc

SEQ ID NO: 271 - RNA, 23 nt, synthetic construct
  source 1..23: mol_type = other RNA
tcaaaaccagagcaggcactggc

SEQ ID NO: 272 - RNA, 23 nt, synthetic construct
  source 1..23: mol_type = other RNA
ttgctcattccacaaaaccagag

SEQ ID NO: 273 - RNA, 23 nt, synthetic construct
  source 1..23: mol_type = other RNA
ttcctcgctgatgtcctccagcc

SEQ ID NO: 274 - RNA, 23 nt, synthetic construct
  source 1..23: mol_type = other RNA
tcagctcgggtcctcgctgatgt

SEQ ID NO: 275 - RNA, 23 nt, synthetic construct
  source 1..23: mol_type = other RNA
tgcattgaggttgaccacacggg

SEQ ID NO: 276 - RNA, 23 nt, synthetic construct
  source 1..23: mol_type = other RNA
tatgagcagggcattgaggttga

SEQ ID NO: 277 - RNA, 23 nt, synthetic construct
  source 1..23: mol_type = other RNA
tccactgccatcatgagcagggc

SEQ ID NO: 278 - RNA, 23 nt, synthetic construct
  source 1..23: mol_type = other RNA
tcagaggaacacggccactgcca

SEQ ID NO: 279 - RNA, 23 nt, synthetic construct
  source 1..23: mol_type = other RNA
tcagttggtcttaggcatagaag

SEQ ID NO: 280 - RNA, 23 nt, synthetic construct
  source 1..23: mol_type = other RNA
ttgtccaacgcagttggtcttag

SEQ ID NO: 281 - RNA, 23 nt, synthetic construct
  source 1..23: mol_type = other RNA
ttggcttatggtgtccaacgcag

SEQ ID NO: 282 - RNA, 23 nt, synthetic construct
  source 1..23: mol_type = other RNA
tcacttcctgtgaggctgtggct

SEQ ID NO: 283 - RNA, 23 nt, synthetic construct
  source 1..23: mol_type = other RNA
taggcagaggaaggccgggagaa

SEQ ID NO: 284 - RNA, 23 nt, synthetic construct
  source 1..23: mol_type = other RNA
tctgccaatcagatgcagtgggc

SEQ ID NO: 285 - RNA, 23 nt, synthetic construct
  source 1..23: mol_type = other RNA
tccctcatgggaagtgactgcca

SEQ ID NO: 286 - RNA, 23 nt, synthetic construct
  source 1..23: mol_type = other RNA
ttttccttagggcaactgcagcg

SEQ ID NO: 287 - RNA, 21 nt, synthetic construct
  source 1..21: mol_type = other RNA
  modified_base 1: mod_base = OTHER; note = 2'-O-methylguanosine-3'-phosphorothioate
  modified_base 2: mod_base = OTHER; note = 2'-O-methyladenosine-3'-phosphorothioate
  modified_base 3: mod_base = OTHER; note = 2'-O-methylguanosine-3'-phosphate
  modified_base 4: mod_base = OTHER; note = 2'-O-methyladenosine-3'-phosphate
  modified_base 5: mod_base = OTHER; note = 2'-O-methyladenosine-3'-phosphate
  modified_base 6: mod_base = OTHER; note = 2'-O-hexadecyl-uridine-3'-phosphate
  modified_base 7: mod_base = OTHER; note = 2'-deoxy-2'-fluoroguanosine-3'-phosphate
  modified_base 8: mod_base = OTHER; note = 2'-O-methylguanosine-3'-phosphate
  modified_base 9: mod_base = OTHER; note = 2'-deoxy-2'-fluoroadenosine-3'-phosphate
  modified_base 10: mod_base = OTHER; note = 2'-deoxy-2'-fluoroguanosine-3'-phosphate
  modified_base 11: mod_base = OTHER; note = 2'-deoxy-2'-fluoroguanosine-3'-phosphate
  modified_base 12: mod_base = OTHER; note = 2'-O-methyladenosine-3'-phosphate
  modified_base 13: mod_base = OTHER; note = 2'-O-methylguanosine-3'-phosphate
  modified_base 14: mod_base = OTHER; note = 2'-O-methylcytidine-3'-phosphate
  modified_base 15: mod_base = OTHER; note = 2'-O-methyladenosine-3'-phosphate
  modified_base 16: mod_base = OTHER; note = 2'-O-methylcytidine-3'-phosphate
  modified_base 17: mod_base = OTHER; note = 2'-O-methyladenosine-3'-phosphate
  modified_base 18: mod_base = OTHER; note = 2'-O-methylcytidine-3'-phosphate
  modified_base 19: mod_base = OTHER; note = 2'-O-methyladenosine-3'-phosphorothioate
  modified_base 20: mod_base = OTHER; note = 2'-O-methylguanosine-3'-phosphorothioate
  modified_base 21: mod_base = OTHER; note = 2'-O-methyladenosine
gagaatggaggagcacacaga

SEQ ID NO: 288 - RNA, 21 nt, synthetic construct
  source 1..21: mol_type = other RNA
  modified_base 1: mod_base = OTHER; note = 2'-O-methylguanosine-3'-phosphorothioate
  modified_base 2: mod_base = OTHER; note = 2'-O-methylguanosine-3'-phosphorothioate
  modified_base 3: mod_base = OTHER; note = 2'-O-methyladenosine-3'-phosphate
  modified_base 4: mod_base = OTHER; note = 2'-O-methylguanosine-3'-phosphate
  modified_base 5: mod_base = OTHER; note = 2'-O-methylcytidine-3'-phosphate
  modified_base 6: mod_base = OTHER; note = 2'-O-hexadecyl-adenosine-3'-phosphate
  modified_base 7: mod_base = OTHER; note = 2'-deoxy-2'-fluorocytidine-3'-phosphate
  modified_base 8: mod_base = OTHER; note = 2'-O-methyladenosine-3'-phosphate
  modified_base 9: mod_base = OTHER; note = 2'-deoxy-2'-fluorocytidine-3'-phosphate
  modified_base 10: mod_base = OTHER; note = 2'-deoxy-2'-fluoroadenosine-3'-phosphate
  modified_base 11: mod_base = OTHER; note = 2'-deoxy-2'-fluoroguanosine-3'-phosphate
  modified_base 12: mod_base = OTHER; note = 2'-O-methyladenosine-3'-phosphate
  modified_base 13: mod_base = OTHER; note = 2'-O-methylguanosine-3'-phosphate
  modified_base 14: mod_base = OTHER; note = 2'-O-methylguanosine-3'-phosphate
  modified_base 15: mod_base = OTHER; note = 2'-O-methylcytidine-3'-phosphate
  modified_base 16: mod_base = OTHER; note = 2'-O-methyladenosine-3'-phosphate
  modified_base 17: mod_base = OTHER; note = 2'-O-methylguanosine-3'-phosphate
  modified_base 18: mod_base = OTHER; note = 2'-O-methylguanosine-3'-phosphate
  modified_base 19: mod_base = OTHER; note = 2'-O-methylcytidine-3'-phosphorothioate
  modified_base 20: mod_base = OTHER; note = 2'-O-methyluridine-3'-phosphorothioate
  modified_base 21: mod_base = OTHER; note = 2'-O-methyladenosine
ggagcacacagaggcaggcta

SEQ ID NO: 289 - RNA, 21 nt, synthetic construct
  source 1..21: mol_type = other RNA
  modified_base 1: mod_base = OTHER; note = 2'-O-methylguanosine-3'-phosphorothioate
  modified_base 2: mod_base = OTHER; note = 2'-O-methylcytidine-3'-phosphorothioate
  modified_base 3: mod_base = OTHER; note = 2'-O-methyladenosine-3'-phosphate
  modified_base 4: mod_base = OTHER; note = 2'-O-methylguanosine-3'-phosphate
  modified_base 5: mod_base = OTHER; note = 2'-O-methylguanosine-3'-phosphate
  modified_base 6: mod_base = OTHER; note = 2'-O-hexadecyl-cytidine-3'-phosphate
  modified_base 7: mod_base = OTHER; note = 2'-deoxy-2'-fluorouridine-3'-phosphate
  modified_base 8: mod_base = OTHER; note = 2'-O-methylcytidine-3'-phosphate
  modified_base 9: mod_base = OTHER; note = 2'-deoxy-2'-fluoroguanosine-3'-phosphate
  modified_base 10: mod_base = OTHER; note = 2'-deoxy-2'-fluoroguanosine-3'-phosphate
  modified_base 11: mod_base = OTHER; note = 2'-deoxy-2'-fluorocytidine-3'-phosphate
  modified_base 12: mod_base = OTHER; note = 2'-O-methyladenosine-3'-phosphate
  modified_base 13: mod_base = OTHER; note = 2'-O-methylcytidine-3'-phosphate
  modified_base 14: mod_base = OTHER; note = 2'-O-methylcytidine-3'-phosphate
  modified_base 15: mod_base = OTHER; note = 2'-O-methyladenosine-3'-phosphate
  modified_base 16: mod_base = OTHER; note = 2'-O-methylguanosine-3'-phosphate
  modified_base 17: mod_base = OTHER; note = 2'-O-methyladenosine-3'-phosphate
  modified_base 18: mod_base = OTHER; note = 2'-O-methylguanosine-3'-phosphate
  modified_base 19: mod_base = OTHER; note = 2'-O-methyladenosine-3'-phosphorothioate
  modified_base 20: mod_base = OTHER; note = 2'-O-methyluridine-3'-phosphorothioate
  modified_base 21: mod_base = OTHER; note = 2'-O-methyladenosine
gcaggctcggcaccagagata

SEQ ID NO: 290 - RNA, 21 nt, synthetic construct
  source 1..21: mol_type = other RNA
  modified_base 1: mod_base = OTHER; note = 2'-O-methylcytidine-3'-phosphorothioate
  modified_base 2: mod_base = OTHER; note = 2'-O-methylcytidine-3'-phosphorothioate
  modified_base 3: mod_base = OTHER; note = 2'-O-methylcytidine-3'-phosphate
  modified_base 4: mod_base = OTHER; note = 2'-O-methyladenosine-3'-phosphate
  modified_base 5: mod_base = OTHER; note = 2'-O-methylguanosine-3'-phosphate
  modified_base 6: mod_base = OTHER; note = 2'-O-hexadecyl-adenosine-3'-phosphate
  modified_base 7: mod_base = OTHER; note = 2'-deoxy-2'-fluoroadenosine-3'-phosphate
  modified_base 8: mod_base = OTHER; note = 2'-O-methylguanosine-3'-phosphate
  modified_base 9: mod_base = OTHER; note = 2'-deoxy-2'-fluoroguanosine-3'-phosphate
  modified_base 10: mod_base = OTHER; note = 2'-deoxy-2'-fluorocytidine-3'-phosphate
  modified_base 11: mod_base = OTHER; note = 2'-deoxy-2'-fluorocytidine-3'-phosphate
  modified_base 12: mod_base = OTHER; note = 2'-O-methylcytidine-3'-phosphate
  modified_base 13: mod_base = OTHER; note = 2'-O-methyluridine-3'-phosphate
  modified_base 14: mod_base = OTHER; note = 2'-O-methylguanosine-3'-phosphate
  modified_base 15: mod_base = OTHER; note = 2'-O-methyladenosine-3'-phosphate
  modified_base 16: mod_base = OTHER; note = 2'-O-methyluridine-3'-phosphate
  modified_base 17: mod_base = OTHER; note = 2'-O-methyluridine-3'-phosphate
  modified_base 18: mod_base = OTHER; note = 2'-O-methylguanosine-3'-phosphate
  modified_base 19: mod_base = OTHER; note = 2'-O-methyladenosine-3'-phosphorothioate
  modified_base 20: mod_base = OTHER; note = 2'-O-methylcytidine-3'-phosphorothioate
  modified_base 21: mod_base = OTHER; note = 2'-O-methyladenosine
cccagaaggccctgattgaca

SEQ ID NO: 291 - RNA, 21 nt, synthetic construct
  source 1..21: mol_type = other RNA
  modified_base 1: mod_base = OTHER; note = 2'-O-methylcytidine-3'-phosphorothioate
  modified_base 2: mod_base = OTHER; note = 2'-O-methylcytidine-3'-phosphorothioate
  modified_base 3: mod_base = OTHER; note = 2'-O-methylcytidine-3'-phosphate
  modified_base 4: mod_base = OTHER; note = 2'-O-methyluridine-3'-phosphate
  modified_base 5: mod_base = OTHER; note = 2'-O-methylguanosine-3'-phosphate
  modified_base 6: mod_base = OTHER; note = 2'-O-hexadecyl-adenosine-3'-phosphate
  modified_base 7: mod_base = OTHER; note = 2'-deoxy-2'-fluorouridine-3'-phosphate
  modified_base 8: mod_base = OTHER; note = 2'-O-methyluridine-3'-phosphate
  modified_base 9: mod_base = OTHER; note = 2'-deoxy-2'-fluoroguanosine-3'-phosphate
  modified_base 10: mod_base = OTHER; note = 2'-deoxy-2'-fluoroadenosine-3'-phosphate
  modified_base 11: mod_base = OTHER; note = 2'-deoxy-2'-fluorocytidine-3'-phosphate
  modified_base 12: mod_base = OTHER; note = 2'-O-methyladenosine-3'-phosphate
  modified_base 13: mod_base = OTHER; note = 2'-O-methyladenosine-3'-phosphate
  modified_base 14: mod_base = OTHER; note = 2'-O-methyluridine-3'-phosphate
  modified_base 15: mod_base = OTHER; note = 2'-O-methylcytidine-3'-phosphate
  modified_base 16: mod_base = OTHER; note = 2'-O-methylcytidine-3'-phosphate
  modified_base 17: mod_base = OTHER; note = 2'-O-methyluridine-3'-phosphate
  modified_base 18: mod_base = OTHER; note = 2'-O-methylguanosine-3'-phosphate
  modified_base 19: mod_base = OTHER; note = 2'-O-methylcytidine-3'-phosphorothioate
  modified_base 20: mod_base = OTHER; note = 2'-O-methyluridine-3'-phosphorothioate
  modified_base 21: mod_base = OTHER; note = 2'-O-methyladenosine
ccctgattgacaatcctgcta

SEQ ID NO: 292 - RNA, 21 nt, synthetic construct
  source 1..21: mol_type = other RNA
  modified_base 1: mod_base = OTHER; note = 2'-O-methyladenosine-3'-phosphorothioate
  modified_base 2: mod_base = OTHER; note = 2'-O-methylcytidine-3'-phosphorothioate
  modified_base 3: mod_base = OTHER; note = 2'-O-methyladenosine-3'-phosphate
  modified_base 4: mod_base = OTHER; note = 2'-O-methyladenosine-3'-phosphate
  modified_base 5: mod_base = OTHER; note = 2'-O-methyluridine-3'-phosphate
  modified_base 6: mod_base = OTHER; note = 2'-O-hexadecyl-cytidine-3'-phosphate
  modified_base 7: mod_base = OTHER; note = 2'-deoxy-2'-fluorocytidine-3'-phosphate
  modified_base 8: mod_base = OTHER; note = 2'-O-methyluridine-3'-phosphate
  modified_base 9: mod_base = OTHER; note = 2'-deoxy-2'-fluoroguanosine-3'-phosphate
  modified_base 10: mod_base = OTHER; note = 2'-deoxy-2'-fluorocytidine-3'-phosphate
  modified_base 11: mod_base = OTHER; note = 2'-deoxy-2'-fluorouridine-3'-phosphate
  modified_base 12: mod_base = OTHER; note = 2'-O-methylguanosine-3'-phosphate
  modified_base 13: mod_base = OTHER; note = 2'-O-methyladenosine-3'-phosphate
  modified_base 14: mod_base = OTHER; note = 2'-O-methylcytidine-3'-phosphate
  modified_base 15: mod_base = OTHER; note = 2'-O-methyladenosine-3'-phosphate
  modified_base 16: mod_base = OTHER; note = 2'-O-methyluridine-3'-phosphate
  modified_base 17: mod_base = OTHER; note = 2'-O-methylcytidine-3'-phosphate
  modified_base 18: mod_base = OTHER; note = 2'-O-methylcytidine-3'-phosphate
  modified_base 19: mod_base = OTHER; note = 2'-O-methyluridine-3'-phosphorothioate
  modified_base 20: mod_base = OTHER; note = 2'-O-methyladenosine-3'-phosphorothioate
  modified_base 21: mod_base = OTHER; note = 2'-O-methyladenosine
acaatcctgctgacatcctaa

SEQ ID NO: 293 - RNA, 21 nt, synthetic construct
  source 1..21: mol_type = other RNA
  modified_base 1: mod_base = OTHER; note = 2'-O-methyluridine-3'-phosphorothioate
  modified_base 2: mod_base = OTHER; note = 2'-O-methylguanosine-3'-phosphorothioate
  modified_base 3: mod_base = OTHER; note = 2'-O-methyladenosine-3'-phosphate
  modified_base 4: mod_base = OTHER; note = 2'-O-methylcytidine-3'-phosphate
  modified_base 5: mod_base = OTHER; note = 2'-O-methyladenosine-3'-phosphate
  modified_base 6: mod_base = OTHER; note = 2'-O-hexadecyl-uridine-3'-phosphate
  modified_base 7: mod_base = OTHER; note = 2'-deoxy-2'-fluorocytidine-3'-phosphate
  modified_base 8: mod_base = OTHER; note = 2'-O-methylcytidine-3'-phosphate
  modified_base 9: mod_base = OTHER; note = 2'-deoxy-2'-fluorouridine-3'-phosphate
  modified_base 10: mod_base = OTHER; note = 2'-deoxy-2'-fluoroadenosine-3'-phosphate
  modified_base 11: mod_base = OTHER; note = 2'-deoxy-2'-fluoroguanosine-3'-phosphate
  modified_base 12: mod_base = OTHER; note = 2'-O-methyluridine-3'-phosphate
  modified_base 13: mod_base = OTHER; note = 2'-O-methylcytidine-3'-phosphate
  modified_base 14: mod_base = OTHER; note = 2'-O-methyladenosine-3'-phosphate
  modified_base 15: mod_base = OTHER; note = 2'-O-methyluridine-3'-phosphate
  modified_base 16: mod_base = OTHER; note = 2'-O-methyluridine-3'-phosphate
  modified_base 17: mod_base = OTHER; note = 2'-O-methylguanosine-3'-phosphate
  modified_base 18: mod_base = OTHER; note = 2'-O-methylcytidine-3'-phosphate
  modified_base 19: mod_base = OTHER; note = 2'-O-methyluridine-3'-phosphorothioate
  modified_base 20: mod_base = OTHER; note = 2'-O-methylguanosine-3'-phosphorothioate
  modified_base 21: mod_base = OTHER; note = 2'-O-methyladenosine
tgacatcctagtcattgctga

SEQ ID NO: 294 - RNA, 21 nt, synthetic construct
  source 1..21: mol_type = other RNA
  modified_base 1: mod_base = OTHER; note = 2'-O-methylguanosine-3'-phosphorothioate
  modified_base 2: mod_base = OTHER; note = 2'-O-methyluridine-3'-phosphorothioate
  modified_base 3: mod_base = OTHER; note = 2'-O-methylcytidine-3'-phosphate
  modified_base 4: mod_base = OTHER; note = 2'-O-methyladenosine-3'-phosphate
  modified_base 5: mod_base = OTHER; note = 2'-O-methyluridine-3'-phosphate
  modified_base 6: mod_base = OTHER; note = 2'-O-hexadecyl-uridine-3'-phosphate
  modified_base 7: mod_base = OTHER; note = 2'-deoxy-2'-fluoroguanosine-3'-phosphate
  modified_base 8: mod_base = OTHER; note = 2'-O-methylcytidine-3'-phosphate
  modified_base 9: mod_base = OTHER; note = 2'-deoxy-2'-fluorouridine-3'-phosphate
  modified_base 10: mod_base = OTHER; note = 2'-deoxy-2'-fluoroguanosine-3'-phosphate
  modified_base 11: mod_base = OTHER; note = 2'-deoxy-2'-fluorocytidine-3'-phosphate
  modified_base 12: mod_base = OTHER; note = 2'-O-methyladenosine-3'-phosphate
  modified_base 13: mod_base = OTHER; note = 2'-O-methyluridine-3'-phosphate
  modified_base 14: mod_base = OTHER; note = 2'-O-methyladenosine-3'-phosphate
  modified_base 15: mod_base = OTHER; note = 2'-O-methyluridine-3'-phosphate
  modified_base 16: mod_base = OTHER; note = 2'-O-methyluridine-3'-phosphate
  modified_base 17: mod_base = OTHER; note = 2'-O-methyluridine-3'-phosphate
  modified_base 18: mod_base = OTHER; note = 2'-O-methylcytidine-3'-phosphate
  modified_base 19: mod_base = OTHER; note = 2'-O-methylcytidine-3'-phosphorothioate
  modified_base 20: mod_base = OTHER; note = 2'-O-methyluridine-3'-phosphorothioate
  modified_base 21: mod_base = OTHER; note = 2'-O-methyladenosine
gtcattgctgcatatttccta

SEQ ID NO: 295 - RNA, 21 nt, synthetic construct
  source 1..21: mol_type = other RNA
  modified_base 1: mod_base = OTHER; note = 2'-O-methylguanosine-3'-phosphorothioate
  modified_base 2: mod_base = OTHER; note = 2'-O-methylcytidine-3'-phosphorothioate
  modified_base 3: mod_base = OTHER; note = 2'-O-methyladenosine-3'-phosphate
  modified_base 4: mod_base = OTHER; note = 2'-O-methyluridine-3'-phosphate
  modified_base 5: mod_base = OTHER; note = 2'-O-methyladenosine-3'-phosphate
  modified_base 6: mod_base = OTHER; note = 2'-O-hexadecyl-uridine-3'-phosphate
  modified_base 7: mod_base = OTHER; note = 2'-deoxy-2'-fluorouridine-3'-phosphate
  modified_base 8: mod_base = OTHER; note = 2'-O-methyluridine-3'-phosphate
  modified_base 9: mod_base = OTHER; note = 2'-deoxy-2'-fluorocytidine-3'-phosphate
  modified_base 10: mod_base = OTHER; note = 2'-deoxy-2'-fluorocytidine-3'-phosphate
  modified_base 11: mod_base = OTHER; note = 2'-deoxy-2'-fluorouridine-3'-phosphate
  modified_base 12: mod_base = OTHER; note = 2'-O-methylguanosine-3'-phosphate
  modified_base 13: mod_base = OTHER; note = 2'-O-methylcytidine-3'-phosphate
  modified_base 14: mod_base = OTHER; note = 2'-O-methyluridine-3'-phosphate
  modified_base 15: mod_base = OTHER; note = 2'-O-methylguanosine-3'-phosphate
  modified_base 16: mod_base = OTHER; note = 2'-O-methylguanosine-3'-phosphate
  modified_base 17: mod_base = OTHER; note = 2'-O-methyluridine-3'-phosphate
  modified_base 18: mod_base = OTHER; note = 2'-O-methylcytidine-3'-phosphate
  modified_base 19: mod_base = OTHER; note = 2'-O-methyladenosine-3'-phosphorothioate
  modified_base 20: mod_base = OTHER; note = 2'-O-methyluridine-3'-phosphorothioate
  modified_base 21: mod_base = OTHER; note = 2'-O-methyladenosine
gcatatttcctgctggtcata

SEQ ID NO: 296 - RNA, 21 nt, synthetic construct
  source 1..21: mol_type = other RNA
  modified_base 1: mod_base = OTHER; note = 2'-O-methylcytidine-3'-phosphorothioate
  modified_base 2: mod_base = OTHER; note = 2'-O-methyluridine-3'-phosphorothioate
  modified_base 3: mod_base = OTHER; note = 2'-O-methylguanosine-3'-phosphate
  modified_base 4: mod_base = OTHER; note = 2'-O-methylcytidine-3'-phosphate
  modified_base 5: mod_base = OTHER; note = 2'-O-methyluridine-3'-phosphate
  modified_base 6: mod_base = OTHER; note = 2'-O-hexadecyl-guanosine-3'-phosphate
  modified_base 7: mod_base = OTHER; note = 2'-deoxy-2'-fluoroguanosine-3'-phosphate
  modified_base 8: mod_base = OTHER; note = 2'-O-methyluridine-3'-phosphate
  modified_base 9: mod_base = OTHER; note = 2'-deoxy-2'-fluorocytidine-3'-phosphate
  modified_base 10: mod_base = OTHER; note = 2'-deoxy-2'-fluoroadenosine-3'-phosphate
  modified_base 11: mod_base = OTHER; note = 2'-deoxy-2'-fluorouridine-3'-phosphate
  modified_base 12: mod_base = OTHER; note = 2'-O-methyluridine-3'-phosphate
  modified_base 13: mod_base = OTHER; note = 2'-O-methylguanosine-3'-phosphate
  modified_base 14: mod_base = OTHER; note = 2'-O-methylguanosine-3'-phosphate
  modified_base 15: mod_base = OTHER; note = 2'-O-methylcytidine-3'-phosphate
  modified_base 16: mod_base = OTHER; note = 2'-O-methylguanosine-3'-phosphate
  modified_base 17: mod_base = OTHER; note = 2'-O-methyluridine-3'-phosphate
  modified_base 18: mod_base = OTHER; note = 2'-O-methyluridine-3'-phosphate
  modified_base 19: mod_base = OTHER; note = 2'-O-methylguanosine-3'-phosphorothioate
  modified_base 20: mod_base = OTHER; note = 2'-O-methylguanosine-3'-phosphorothioate
  modified_base 21: mod_base = OTHER; note = 2'-O-methyladenosine
ctgctggtcattggcgttgga

SEQ ID NO: 297 - RNA, 21 nt, synthetic construct
  source 1..21: mol_type = other RNA
  modified_base 1: mod_base = OTHER; note = 2'-O-methyluridine-3'-phosphorothioate
  modified_base 2: mod_base = OTHER; note = 2'-O-methylguanosine-3'-phosphorothioate
  modified_base 3: mod_base = OTHER; note = 2'-O-methylguanosine-3'-phosphate
  modified_base 4: mod_base = OTHER; note = 2'-O-methylcytidine-3'-phosphate
  modified_base 5: mod_base = OTHER; note = 2'-O-methylguanosine-3'-phosphate
  modified_base 6: mod_base = OTHER; note = 2'-O-hexadecyl-uridine-3'-phosphate
  modified_base 7: mod_base = OTHER; note = 2'-deoxy-2'-fluorouridine-3'-phosphate
  modified_base 8: mod_base = OTHER; note = 2'-O-methylguanosine-3'-phosphate
  modified_base 9: mod_base = OTHER; note = 2'-deoxy-2'-fluoroguanosine-3'-phosphate
  modified_base 10: mod_base = OTHER; note = 2'-deoxy-2'-fluorocytidine-3'-phosphate
  modified_base 11: mod_base = OTHER; note = 2'-deoxy-2'-fluorouridine-3'-phosphate
  modified_base 12: mod_base = OTHER; note = 2'-O-methyluridine-3'-phosphate
  modified_base 13: mod_base = OTHER; note = 2'-O-methylguanosine-3'-phosphate
  modified_base 14: mod_base = OTHER; note = 2'-O-methyluridine-3'-phosphate
  modified_base 15: mod_base = OTHER; note = 2'-O-methylguanosine-3'-phosphate
  modified_base 16: mod_base = OTHER; note = 2'-O-methylguanosine-3'-phosphate
  modified_base 17: mod_base = OTHER; note = 2'-O-methyluridine-3'-phosphate
  modified_base 18: mod_base = OTHER; note = 2'-O-methylcytidine-3'-phosphate
  modified_base 19: mod_base = OTHER; note = 2'-O-methylcytidine-3'-phosphorothioate
  modified_base 20: mod_base = OTHER; note = 2'-O-methyladenosine-3'-phosphorothioate
  modified_base 21: mod_base = OTHER; note = 2'-O-methyladenosine
tggcgttggcttgtggtccaa

SEQ ID NO: 298 - RNA, 21 nt, synthetic construct
  source 1..21: mol_type = other RNA
  modified_base 1: mod_base = OTHER; note = 2'-O-methylguanosine-3'-phosphorothioate
  modified_base 2: mod_base = OTHER; note = 2'-O-methyluridine-3'-phosphorothioate
  modified_base 3: mod_base = OTHER; note = 2'-O-methylcytidine-3'-phosphate
  modified_base 4: mod_base = OTHER; note = 2'-O-methylcytidine-3'-phosphate
  modified_base 5: mod_base = OTHER; note = 2'-O-methyladenosine-3'-phosphate
  modified_base 6: mod_base = OTHER; note = 2'-O-hexadecyl-uridine-3'-phosphate
  modified_base 7: mod_base = OTHER; note = 2'-deoxy-2'-fluoroguanosine-3'-phosphate
  modified_base 8: mod_base = OTHER; note = 2'-O-methyluridine-3'-phosphate
  modified_base 9: mod_base = OTHER; note = 2'-deoxy-2'-fluoroguanosine-3'-phosphate
  modified_base 10: mod_base = OTHER; note = 2'-deoxy-2'-fluorocytidine-3'-phosphate
  modified_base 11: mod_base = OTHER; note = 2'-deoxy-2'-fluoroadenosine-3'-phosphate
  modified_base 12: mod_base = OTHER; note = 2'-O-methylguanosine-3'-phosphate
  modified_base 13: mod_base = OTHER; note = 2'-O-methyladenosine-3'-phosphate
  modified_base 14: mod_base = OTHER; note = 2'-O-methyladenosine-3'-phosphate
  modified_base 15: mod_base = OTHER; note = 2'-O-methylcytidine-3'-phosphate
  modified_base 16: mod_base = OTHER; note = 2'-O-methylcytidine-3'-phosphate
  modified_base 17: mod_base = OTHER; note = 2'-O-methyladenosine-3'-phosphate
  modified_base 18: mod_base = OTHER; note = 2'-O-methyladenosine-3'-phosphate
  modified_base 19: mod_base = OTHER; note = 2'-O-methylcytidine-3'-phosphorothioate
  modified_base 20: mod_base = OTHER; note = 2'-O-methyladenosine-3'-phosphorothioate
  modified_base 21: mod_base = OTHER; note = 2'-O-methyladenosine
gtccatgtgcagaaccaacaa

SEQ ID NO: 299 - RNA, 21 nt, synthetic construct
  source 1..21: mol_type = other RNA
  modified_base 1: mod_base = OTHER; note = 2'-O-methylcytidine-3'-phosphorothioate
  modified_base 2: mod_base = OTHER; note = 2'-O-methyladenosine-3'-phosphorothioate
  modified_base 3: mod_base = OTHER; note = 2'-O-methylguanosine-3'-phosphate
  modified_base 4: mod_base = OTHER; note = 2'-O-methyladenosine-3'-phosphate
  modified_base 5: mod_base = OTHER; note = 2'-O-methyladenosine-3'-phosphate
  modified_base 6: mod_base = OTHER; note = 2'-O-hexadecyl-cytidine-3'-phosphate
  modified_base 7: mod_base = OTHER; note = 2'-deoxy-2'-fluorocytidine-3'-phosphate
  modified_base 8: mod_base = OTHER; note = 2'-O-methyladenosine-3'-phosphate
  modified_base 9: mod_base = OTHER; note = 2'-deoxy-2'-fluoroadenosine-3'-phosphate
  modified_base 10: mod_base = OTHER; note = 2'-deoxy-2'-fluorocytidine-3'-phosphate
  modified_base 11: mod_base = OTHER; note = 2'-deoxy-2'-fluoroadenosine-3'-phosphate
  modified_base 12: mod_base = OTHER; note = 2'-O-methylguanosine-3'-phosphate
  modified_base 13: mod_base = OTHER; note = 2'-O-methyladenosine-3'-phosphate
  modified_base 14: mod_base = OTHER; note = 2'-O-methylguanosine-3'-phosphate
  modified_base 15: mod_base = OTHER; note = 2'-O-methylguanosine-3'-phosphate
  modified_base 16: mod_base = OTHER; note = 2'-O-methylcytidine-3'-phosphate
  modified_base 17: mod_base = OTHER; note = 2'-O-methyladenosine-3'-phosphate
  modified_base 18: mod_base = OTHER; note = 2'-O-methylcytidine-3'-phosphate
  modified_base 19: mod_base = OTHER; note = 2'-O-methyluridine-3'-phosphorothioate
  modified_base 20: mod_base = OTHER; note = 2'-O-methylguanosine-3'-phosphorothioate
  modified_base 21: mod_base = OTHER; note = 2'-O-methyladenosine
cagaaccaacagaggcactga

SEQ ID NO: 300 - RNA, 21 nt, synthetic construct
  source 1..21: mol_type = other RNA
  modified_base 1: mod_base = OTHER; note = 2'-O-methyladenosine-3'-phosphorothioate
  modified_base 2: mod_base = OTHER; note = 2'-O-methylguanosine-3'-phosphorothioate
  modified_base 3: mod_base = OTHER; note = 2'-O-methyladenosine-3'-phosphate
  modified_base 4: mod_base = OTHER; note = 2'-O-methylguanosine-3'-phosphate
  modified_base 5: mod_base = OTHER; note = 2'-O-methylguanosine-3'-phosphate
  modified_base 6: mod_base = OTHER; note = 2'-O-hexadecyl-cytidine-3'-phosphate
  modified_base 7: mod_base = OTHER; note = 2'-deoxy-2'-fluoroadenosine-3'-phosphate
  modified_base 8: mod_base = OTHER; note = 2'-O-methylcytidine-3'-phosphate
  modified_base 9: mod_base = OTHER; note = 2'-deoxy-2'-fluorouridine-3'-phosphate
  modified_base 10: mod_base = OTHER; note = 2'-deoxy-2'-fluoroguanosine-3'-phosphate
  modified_base 11: mod_base = OTHER; note = 2'-deoxy-2'-fluorouridine-3'-phosphate
  modified_base 12: mod_base = OTHER; note = 2'-O-methylguanosine-3'-phosphate
  modified_base 13: mod_base = OTHER; note = 2'-O-methylguanosine-3'-phosphate
  modified_base 14: mod_base = OTHER; note = 2'-O-methylguanosine-3'-phosphate
  modified_base 15: mod_base = OTHER; note = 2'-O-methylcytidine-3'-phosphate
  modified_base 16: mod_base = OTHER; note = 2'-O-methylguanosine-3'-phosphate
  modified_base 17: mod_base = OTHER; note = 2'-O-methylguanosine-3'-phosphate
  modified_base 18: mod_base = OTHER; note = 2'-O-methylcytidine-3'-phosphate
  modified_base 19: mod_base = OTHER; note = 2'-O-methyluridine-3'-phosphorothioate
  modified_base 20: mod_base = OTHER; note = 2'-O-methyladenosine-3'-phosphorothioate
  modified_base 21: mod_base = OTHER; note = 2'-O-methyladenosine
agaggcactgtgggcggctaa

SEQ ID NO: 301 - RNA, 21 nt, synthetic construct
  source 1..21: mol_type = other RNA
  modified_base 1: mod_base = OTHER; note = 2'-O-methyluridine-3'-phosphorothioate
  modified_base 2: mod_base = OTHER; note = 2'-O-methylguanosine-3'-phosphorothioate
  modified_base 3: mod_base = OTHER; note = 2'-O-methylguanosine-3'-phosphate
  modified_base 4: mod_base = OTHER; note = 2'-O-methylguanosine-3'-phosphate
  modified_base 5: mod_base = OTHER; note = 2'-O-methylcytidine-3'-phosphate
  modified_base 6: mod_base = OTHER; note = 2'-O-hexadecyl-guanosine-3'-phosphate
  modified_base 7: mod_base = OTHER; note = 2'-deoxy-2'-fluoroguanosine-3'-phosphate
  modified_base 8: mod_base = OTHER; note = 2'-O-methylcytidine-3'-phosphate
  modified_base 9: mod_base = OTHER; note = 2'-deoxy-2'-fluorouridine-3'-phosphate
  modified_base 10: mod_base = OTHER; note = 2'-deoxy-2'-fluoroadenosine-3'-phosphate
  modified_base 11: mod_base = OTHER; note = 2'-deoxy-2'-fluorocytidine-3'-phosphate
  modified_base 12: mod_base = OTHER; note = 2'-O-methyluridine-3'-phosphate
  modified_base 13: mod_base = OTHER; note = 2'-O-methyluridine-3'-phosphate
  modified_base 14: mod_base = OTHER; note = 2'-O-methylcytidine-3'-phosphate
  modified_base 15: mod_base = OTHER; note = 2'-O-methylcytidine-3'-phosphate
  modified_base 16: mod_base = OTHER; note = 2'-O-methyluridine-3'-phosphate
  modified_base 17: mod_base = OTHER; note = 2'-O-methylguanosine-3'-phosphate
  modified_base 18: mod_base = OTHER; note = 2'-O-methylguanosine-3'-phosphate
  modified_base 19: mod_base = OTHER; note = 2'-O-methylcytidine-3'-phosphorothioate
  modified_base 20: mod_base = OTHER; note = 2'-O-methyladenosine-3'-phosphorothioate
  modified_base 21: mod_base = OTHER; note = 2'-O-methyladenosine
tgggcggctacttcctggcaa

SEQ ID NO: 302 - RNA, 21 nt, synthetic construct
  source 1..21: mol_type = other RNA
  modified_base 1: mod_base = OTHER; note = 2'-O-methylcytidine-3'-phosphorothioate
  modified_base 2: mod_base = OTHER; note = 2'-O-methyluridine-3'-phosphorothioate
  modified_base 3: mod_base = OTHER; note = 2'-O-methyluridine-3'-phosphate
  modified_base 4: mod_base = OTHER; note = 2'-O-methylcytidine-3'-phosphate
  modified_base 5: mod_base = OTHER; note = 2'-O-methylcytidine-3'-phosphate
  modified_base 6: mod_base = OTHER; note = 2'-O-hexadecyl-uridine-3'-phosphate
  modified_base 7: mod_base = OTHER; note = 2'-deoxy-2'-fluoroguanosine-3'-phosphate
  modified_base 8: mod_base = OTHER; note = 2'-O-methylguanosine-3'-phosphate
  modified_base 9: mod_base = OTHER; note = 2'-deoxy-2'-fluorocytidine-3'-phosphate
  modified_base 10: mod_base = OTHER; note = 2'-deoxy-2'-fluoroadenosine-3'-phosphate
  modified_base 11: mod_base = OTHER; note = 2'-deoxy-2'-fluoroguanosine-3'-phosphate
  modified_base 12: mod_base = OTHER; note = 2'-O-methylguanosine-3'-phosphate
  modified_base 13: mod_base = OTHER; note = 2'-O-methyladenosine-3'-phosphate
  modified_base 14: mod_base = OTHER; note = 2'-O-methylcytidine-3'-phosphate
  modified_base 15: mod_base = OTHER; note = 2'-O-methylguanosine-3'-phosphate
  modified_base 16: mod_base = OTHER; note = 2'-O-methylcytidine-3'-phosphate
  modified_base 17: mod_base = OTHER; note = 2'-O-methyladenosine-3'-phosphate
  modified_base 18: mod_base = OTHER; note = 2'-O-methylguanosine-3'-phosphate
  modified_base 19: mod_base = OTHER; note = 2'-O-methylcytidine-3'-phosphorothioate
  modified_base 20: mod_base = OTHER; note = 2'-O-methyladenosine-3'-phosphorothioate
  modified_base 21: mod_base = OTHER; note = 2'-O-methyladenosine
cttcctggcaggacgcagcaa

SEQ ID NO: 303 - RNA, 21 nt, synthetic construct
  source 1..21: mol_type = other RNA
  modified_base 1: mod_base = OTHER; note = 2'-O-methyladenosine-3'-phosphorothioate
  modified_base 2: mod_base = OTHER; note = 2'-O-methylguanosine-3'-phosphorothioate
  modified_base 3: mod_base = OTHER; note = 2'-O-methylguanosine-3'-phosphate
  modified_base 4: mod_base = OTHER; note = 2'-O-methyladenosine-3'-phosphate
  modified_base 5: mod_base = OTHER; note = 2'-O-methylcytidine-3'-phosphate
  modified_base 6: mod_base = OTHER; note = 2'-O-hexadecyl-guanosine-3'-phosphate
  modified_base 7: mod_base = OTHER; note = 2'-deoxy-2'-fluorocytidine-3'-phosphate
  modified_base 8: mod_base = OTHER; note = 2'-O-methyladenosine-3'-phosphate
  modified_base 9: mod_base = OTHER; note = 2'-deoxy-2'-fluoroguanosine-3'-phosphate
  modified_base 10: mod_base = OTHER; note = 2'-deoxy-2'-fluorocytidine-3'-phosphate
  modified_base 11: mod_base = OTHER; note = 2'-deoxy-2'-fluoroadenosine-3'-phosphate
  modified_base 12: mod_base = OTHER; note = 2'-O-methyluridine-3'-phosphate
  modified_base 13: mod_base = OTHER; note = 2'-O-methylguanosine-3'-phosphate
  modified_base 14: mod_base = OTHER; note = 2'-O-methylguanosine-3'-phosphate
  modified_base 15: mod_base = OTHER; note = 2'-O-methyluridine-3'-phosphate
  modified_base 16: mod_base = OTHER; note = 2'-O-methylguanosine-3'-phosphate
  modified_base 17: mod_base = OTHER; note = 2'-O-methyluridine-3'-phosphate
  modified_base 18: mod_base = OTHER; note = 2'-O-methylguanosine-3'-phosphate
  modified_base 19: mod_base = OTHER; note = 2'-O-methylguanosine-3'-phosphorothioate
  modified_base 20: mod_base = OTHER; note = 2'-O-methyluridine-3'-phosphorothioate
  modified_base 21: mod_base = OTHER; note = 2'-O-methyladenosine
aggacgcagcatggtgtggta

SEQ ID NO: 304 - RNA, 21 nt, synthetic construct
  source 1..21: mol_type = other RNA
  modified_base 1: mod_base = OTHER; note = 2'-O-methylcytidine-3'-phosphorothioate
  modified_base 2: mod_base = OTHER; note = 2'-O-methylcytidine-3'-phosphorothioate
  modified_base 3: mod_base = OTHER; note = 2'-O-methyluridine-3'-phosphate
  modified_base 4: mod_base = OTHER; note = 2'-O-methylcytidine-3'-phosphate
  modified_base 5: mod_base = OTHER; note = 2'-O-methyluridine-3'-phosphate
  modified_base 6: mod_base = OTHER; note = 2'-O-hexadecyl-cytidine-3'-phosphate
  modified_base 7: mod_base = OTHER; note = 2'-deoxy-2'-fluorouridine-3'-phosphate
  modified_base 8: mod_base = OTHER; note = 2'-O-methylcytidine-3'-phosphate
  modified_base 9: mod_base = OTHER; note = 2'-deoxy-2'-fluorouridine-3'-phosphate
  modified_base 10: mod_base = OTHER; note = 2'-deoxy-2'-fluorouridine-3'-phosphate
  modified_base 11: mod_base = OTHER; note = 2'-deoxy-2'-fluorocytidine-3'-phosphate
  modified_base 12: mod_base = OTHER; note = 2'-O-methylguanosine-3'-phosphate
  modified_base 13: mod_base = OTHER; note = 2'-O-methylcytidine-3'-phosphate
  modified_base 14: mod_base = OTHER; note = 2'-O-methylcytidine-3'-phosphate
  modified_base 15: mod_base = OTHER; note = 2'-O-methyladenosine-3'-phosphate
  modified_base 16: mod_base = OTHER; note = 2'-O-methylguanosine-3'-phosphate
  modified_base 17: mod_base = OTHER; note = 2'-O-methylcytidine-3'-phosphate
  modified_base 18: mod_base = OTHER; note = 2'-O-methyladenosine-3'-phosphate
  modified_base 19: mod_base = OTHER; note = 2'-O-methyladenosine-3'-phosphorothioate
  modified_base 20: mod_base = OTHER; note = 2'-O-methylcytidine-3'-phosphorothioate
  modified_base 21: mod_base = OTHER; note = 2'-O-methyladenosine
cctctctcttcgccagcaaca

SEQ ID NO: 305 - RNA, 21 nt, synthetic construct
  source 1..21: mol_type = other RNA
  modified_base 1: mod_base = OTHER; note = 2'-O-methyluridine-3'-phosphorothioate
  modified_base 2: mod_base = OTHER; note = 2'-O-methylcytidine-3'-phosphorothioate
  modified_base 3: mod_base = OTHER; note = 2'-O-methylguanosine-3'-phosphate
  modified_base 4: mod_base = OTHER; note = 2'-O-methylcytidine-3'-phosphate
  modified_base 5: mod_base = OTHER; note = 2'-O-methylcytidine-3'-phosphate
  modified_base 6: mod_base = OTHER; note = 2'-O-hexadecyl-adenosine-3'-phosphate
  modified_base 7: mod_base = OTHER; note = 2'-deoxy-2'-fluoroguanosine-3'-phosphate
  modified_base 8: mod_base = OTHER; note = 2'-O-methylcytidine-3'-phosphate
  modified_base 9: mod_base = OTHER; note = 2'-deoxy-2'-fluoroadenosine-3'-phosphate
  modified_base 10: mod_base = OTHER; note = 2'-deoxy-2'-fluoroadenosine-3'-phosphate
  modified_base 11: mod_base = OTHER; note = 2'-deoxy-2'-fluorocytidine-3'-phosphate
  modified_base 12: mod_base = OTHER; note = 2'-O-methyladenosine-3'-phosphate
  modified_base 13: mod_base = OTHER; note = 2'-O-methyluridine-3'-phosphate
  modified_base 14: mod_base = OTHER; note = 2'-O-methylcytidine-3'-phosphate
  modified_base 15: mod_base = OTHER; note = 2'-O-methylguanosine-3'-phosphate
  modified_base 16: mod_base = OTHER; note = 2'-O-methylguanosine-3'-phosphate
  modified_base 17: mod_base = OTHER; note = 2'-O-methylcytidine-3'-phosphate
  modified_base 18: mod_base = OTHER; note = 2'-O-methyladenosine-3'-phosphate
  modified_base 19: mod_base = OTHER; note = 2'-O-methylguanosine-3'-phosphorothioate
  modified_base 20: mod_base = OTHER; note = 2'-O-methyluridine-3'-phosphorothioate
  modified_base 21: mod_base = OTHER; note = 2'-O-methyladenosine
tcgccagcaacatcggcagta

SEQ ID NO: 306 - RNA, 21 nt, synthetic construct
  source 1..21: mol_type = other RNA
  modified_base 1: mod_base = OTHER; note = 2'-O-methylcytidine-3'-phosphorothioate
  modified_base 2: mod_base = OTHER; note = 2'-O-methyladenosine-3'-phosphorothioate
  modified_base 3: mod_base = OTHER; note = 2'-O-methyluridine-3'-phosphate
  modified_base 4: mod_base = OTHER; note = 2'-O-methylcytidine-3'-phosphate
  modified_base 5: mod_base = OTHER; note = 2'-O-methylguanosine-3'-phosphate
  modified_base 6: mod_base = OTHER; note = 2'-O-hexadecyl-guanosine-3'-phosphate
  modified_base 7: mod_base = OTHER; note = 2'-deoxy-2'-fluorocytidine-3'-phosphate
  modified_base 8: mod_base = OTHER; note = 2'-O-methyladenosine-3'-phosphate
  modified_base 9: mod_base = OTHER; note = 2'-deoxy-2'-fluoroguanosine-3'-phosphate
  modified_base 10: mod_base = OTHER; note = 2'-deoxy-2'-fluorouridine-3'-phosphate
  modified_base 11: mod_base = OTHER; note = 2'-deoxy-2'-fluoroguanosine-3'-phosphate
  modified_base 12: mod_base = OTHER; note = 2'-O-methylguanosine-3'-phosphate
  modified_base 13: mod_base = OTHER; note = 2'-O-methylcytidine-3'-phosphate
  modified_base 14: mod_base = OTHER; note = 2'-O-methylcytidine-3'-phosphate
  modified_base 15: mod_base = OTHER; note = 2'-O-methyladenosine-3'-phosphate
  modified_base 16: mod_base = OTHER; note = 2'-O-methylcytidine-3'-phosphate
  modified_base 17: mod_base = OTHER; note = 2'-O-methyluridine-3'-phosphate
  modified_base 18: mod_base = OTHER; note = 2'-O-methyluridine-3'-phosphate
  modified_base 19: mod_base = OTHER; note = 2'-O-methyluridine-3'-phosphorothioate
  modified_base 20: mod_base = OTHER; note = 2'-O-methylguanosine-3'-phosphorothioate
  modified_base 21: mod_base = OTHER; note = 2'-O-methyladenosine
catcggcagtggccactttga

SEQ ID NO: 307 - RNA, 21 nt, synthetic construct
  source 1..21: mol_type = other RNA
  modified_base 1: mod_base = OTHER; note = 2'-O-methyluridine-3'-phosphorothioate
  modified_base 2: mod_base = OTHER; note = 2'-O-methylguanosine-3'-phosphorothioate
  modified_base 3: mod_base = OTHER; note = 2'-O-methylguanosine-3'-phosphate
  modified_base 4: mod_base = OTHER; note = 2'-O-methylcytidine-3'-phosphate
  modified_base 5: mod_base = OTHER; note = 2'-O-methylcytidine-3'-phosphate
  modified_base 6: mod_base = OTHER; note = 2'-O-hexadecyl-adenosine-3'-phosphate
  modified_base 7: mod_base = OTHER; note = 2'-deoxy-2'-fluorocytidine-3'-phosphate
  modified_base 8: mod_base = OTHER; note = 2'-O-methyluridine-3'-phosphate
  modified_base 9: mod_base = OTHER; note = 2'-deoxy-2'-fluorouridine-3'-phosphate
  modified_base 10: mod_base = OTHER; note = 2'-deoxy-2'-fluorouridine-3'-phosphate
  modified_base 11: mod_base = OTHER; note = 2'-deoxy-2'-fluoroguanosine-3'-phosphate
  modified_base 12: mod_base = OTHER; note = 2'-O-methyluridine-3'-phosphate
  modified_base 13: mod_base = OTHER; note = 2'-O-methylguanosine-3'-phosphate
  modified_base 14: mod_base = OTHER; note = 2'-O-methylguanosine-3'-phosphate
  modified_base 15: mod_base = OTHER; note = 2'-O-methylguanosine-3'-phosphate
  modified_base 16: mod_base = OTHER; note = 2'-O-methylcytidine-3'-phosphate
  modified_base 17: mod_base = OTHER; note = 2'-O-methylcytidine-3'-phosphate
  modified_base 18: mod_base = OTHER; note = 2'-O-methyluridine-3'-phosphate
  modified_base 19: mod_base = OTHER; note = 2'-O-methylguanosine-3'-phosphorothioate
  modified_base 20: mod_base = OTHER; note = 2'-O-methylguanosine-3'-phosphorothioate
  modified_base 21: mod_base = OTHER; note = 2'-O-methyladenosine
tggccactttgtgggcctgga

SEQ ID NO: 308 - RNA, 21 nt, synthetic construct
  source 1..21: mol_type = other RNA
  modified_base 1: mod_base = OTHER; note = 2'-O-methylcytidine-3'-phosphorothioate
  modified_base 2: mod_base = OTHER; note = 2'-O-methyluridine-3'-phosphorothioate
  modified_base 3: mod_base = OTHER; note = 2'-O-methylguanosine-3'-phosphate
  modified_base 4: mod_base = OTHER; note = 2'-O-methylcytidine-3'-phosphate
  modified_base 5: mod_base = OTHER; note = 2'-O-methyladenosine-3'-phosphate
  modified_base 6: mod_base = OTHER; note = 2'-O-hexadecyl-adenosine-3'-phosphate
  modified_base 7: mod_base = OTHER; note = 2'-deoxy-2'-fluoroguanosine-3'-phosphate
  modified_base 8: mod_base = OTHER; note = 2'-O-methyluridine-3'-phosphate
  modified_base 9: mod_base = OTHER; note = 2'-deoxy-2'-fluoroguanosine-3'-phosphate
  modified_base 10: mod_base = OTHER; note = 2'-deoxy-2'-fluoroguanosine-3'-phosphate
  modified_base 11: mod_base = OTHER; note = 2'-deoxy-2'-fluorocytidine-3'-phosphate
  modified_base 12: mod_base = OTHER; note = 2'-O-methyluridine-3'-phosphate
  modified_base 13: mod_base = OTHER; note = 2'-O-methyluridine-3'-phosphate
  modified_base 14: mod_base = OTHER; note = 2'-O-methylguanosine-3'-phosphate
  modified_base 15: mod_base = OTHER; note = 2'-O-methylguanosine-3'-phosphate
  modified_base 16: mod_base = OTHER; note = 2'-O-methylcytidine-3'-phosphate
  modified_base 17: mod_base = OTHER; note = 2'-O-methyluridine-3'-phosphate
  modified_base 18: mod_base = OTHER; note = 2'-O-methylguanosine-3'-phosphate
  modified_base 19: mod_base = OTHER; note = 2'-O-methyluridine-3'-phosphorothioate
  modified_base 20: mod_base = OTHER; note = 2'-O-methyluridine-3'-phosphorothioate
  modified_base 21: mod_base = OTHER; note = 2'-O-methyladenosine
ctgcaagtggcttggctgtta

SEQ ID NO: 309 - RNA, 21 nt, synthetic construct
  source 1..21: mol_type = other RNA
  modified_base 1: mod_base = OTHER; note = 2'-O-methyluridine-3'-phosphorothioate
  modified_base 2: mod_base = OTHER; note = 2'-O-methyluridine-3'-phosphorothioate
  modified_base 3: mod_base = OTHER; note = 2'-O-methylguanosine-3'-phosphate
  modified_base 4: mod_base = OTHER; note = 2'-O-methylguanosine-3'-phosphate
  modified_base 5: mod_base = OTHER; note = 2'-O-methylcytidine-3'-phosphate
  modified_base 6: mod_base = OTHER; note = 2'-O-hexadecyl-uridine-3'-phosphate
  modified_base 7: mod_base = OTHER; note = 2'-deoxy-2'-fluoroguanosine-3'-phosphate
  modified_base 8: mod_base = OTHER; note = 2'-O-methyluridine-3'-phosphate
  modified_base 9: mod_base = OTHER; note = 2'-deoxy-2'-fluorouridine-3'-phosphate
  modified_base 10: mod_base = OTHER; note = 2'-deoxy-2'-fluoroguanosine-3'-phosphate
  modified_base 11: mod_base = OTHER; note = 2'-deoxy-2'-fluorocytidine-3'-phosphate
  modified_base 12: mod_base = OTHER; note = 2'-O-methyluridine-3'-phosphate
  modified_base 13: mod_base = OTHER; note = 2'-O-methylguanosine-3'-phosphate
  modified_base 14: mod_base = OTHER; note = 2'-O-methylguanosine-3'-phosphate
  modified_base 15: mod_base = OTHER; note = 2'-O-methyladenosine-3'-phosphate
  modified_base 16: mod_base = OTHER; note = 2'-O-methyluridine-3'-phosphate
  modified_base 17: mod_base = OTHER; note = 2'-O-methyluridine-3'-phosphate
  modified_base 18: mod_base = OTHER; note = 2'-O-methylcytidine-3'-phosphate
  modified_base 19: mod_base = OTHER; note = 2'-O-methylguanosine-3'-phosphorothioate
  modified_base 20: mod_base = OTHER; note = 2'-O-methyladenosine-3'-phosphorothioate
  modified_base 21: mod_base = OTHER; note = 2'-O-methyladenosine
ttggctgttgctggattcgaa

SEQ ID NO: 310 - RNA, 21 nt, synthetic construct
  source 1..21: mol_type = other RNA
  modified_base 1: mod_base = OTHER; note = 2'-O-methylcytidine-3'-phosphorothioate
  modified_base 2: mod_base = OTHER; note = 2'-O-methylguanosine-3'-phosphorothioate
  modified_base 3: mod_base = OTHER; note = 2'-O-methyladenosine-3'-phosphate
  modified_base 4: mod_base = OTHER; note = 2'-O-methylguanosine-3'-phosphate
  modified_base 5: mod_base = OTHER; note = 2'-O-methyluridine-3'-phosphate
  modified_base 6: mod_base = OTHER; note = 2'-O-hexadecyl-guanosine-3'-phosphate
  modified_base 7: mod_base = OTHER; note = 2'-deoxy-2'-fluoroguanosine-3'-phosphate
  modified_base 8: mod_base = OTHER; note = 2'-O-methyladenosine-3'-phosphate
  modified_base 9: mod_base = OTHER; note = 2'-deoxy-2'-fluoroadenosine-3'-phosphate
  modified_base 10: mod_base = OTHER; note = 2'-deoxy-2'-fluorouridine-3'-phosphate
  modified_base 11: mod_base = OTHER; note = 2'-deoxy-2'-fluoroguanosine-3'-phosphate
  modified_base 12: mod_base = OTHER; note = 2'-O-methylcytidine-3'-phosphate
  modified_base 13: mod_base = OTHER; note = 2'-O-methylguanosine-3'-phosphate
  modified_base 14: mod_base = OTHER; note = 2'-O-methylcytidine-3'-phosphate
  modified_base 15: mod_base = OTHER; note = 2'-O-methyluridine-3'-phosphate
  modified_base 16: mod_base = OTHER; note = 2'-O-methylcytidine-3'-phosphate
  modified_base 17: mod_base = OTHER; note = 2'-O-methyluridine-3'-phosphate
  modified_base 18: mod_base = OTHER; note = 2'-O-methyluridine-3'-phosphate
  modified_base 19: mod_base = OTHER; note = 2'-O-methylcytidine-3'-phosphorothioate
  modified_base 20: mod_base = OTHER; note = 2'-O-methylguanosine-3'-phosphorothioate
  modified_base 21: mod_base = OTHER; note = 2'-O-methyladenosine
cgagtggaatgcgctcttcga

SEQ ID NO: 311 - RNA, 21 nt, synthetic construct
  source 1..21: mol_type = other RNA
  modified_base 1: mod_base = OTHER; note = 2'-O-methylguanosine-3'-phosphorothioate
  modified_base 2: mod_base = OTHER; note = 2'-O-methylcytidine-3'-phosphorothioate
  modified_base 3: mod_base = OTHER; note = 2'-O-methylguanosine-3'-phosphate
  modified_base 4: mod_base = OTHER; note = 2'-O-methylcytidine-3'-phosphate
  modified_base 5: mod_base = OTHER; note = 2'-O-methyluridine-3'-phosphate
  modified_base 6: mod_base = OTHER; note = 2'-O-hexadecyl-cytidine-3'-phosphate
  modified_base 7: mod_base = OTHER; note = 2'-deoxy-2'-fluorouridine-3'-phosphate
  modified_base 8: mod_base = OTHER; note = 2'-O-methyluridine-3'-phosphate
  modified_base 9: mod_base = OTHER; note = 2'-deoxy-2'-fluorocytidine-3'-phosphate
  modified_base 10: mod_base = OTHER; note = 2'-deoxy-2'-fluoroguanosine-3'-phosphate
  modified_base 11: mod_base = OTHER; note = 2'-deoxy-2'-fluorouridine-3'-phosphate
  modified_base 12: mod_base = OTHER; note = 2'-O-methylguanosine-3'-phosphate
  modified_base 13: mod_base = OTHER; note = 2'-O-methylguanosine-3'-phosphate
  modified_base 14: mod_base = OTHER; note = 2'-O-methyluridine-3'-phosphate
  modified_base 15: mod_base = OTHER; note = 2'-O-methylguanosine-3'-phosphate
  modified_base 16: mod_base = OTHER; note = 2'-O-methylcytidine-3'-phosphate
  modified_base 17: mod_base = OTHER; note = 2'-O-methyluridine-3'-phosphate
  modified_base 18: mod_base = OTHER; note = 2'-O-methylguanosine-3'-phosphate
  modified_base 19: mod_base = OTHER; note = 2'-O-methylcytidine-3'-phosphorothioate
  modified_base 20: mod_base = OTHER; note = 2'-O-methyluridine-3'-phosphorothioate
  modified_base 21: mod_base = OTHER; note = 2'-O-methyladenosine
gcgctcttcgtggtgctgcta

SEQ ID NO: 312 - RNA, 21 nt, synthetic construct
  source 1..21: mol_type = other RNA
  modified_base 1: mod_base = OTHER; note = 2'-O-methylguanosine-3'-phosphorothioate
  modified_base 2: mod_base = OTHER; note = 2'-O-methyluridine-3'-phosphorothioate
  modified_base 3: mod_base = OTHER; note = 2'-O-methylguanosine-3'-phosphate
  modified_base 4: mod_base = OTHER; note = 2'-O-methylguanosine-3'-phosphate
  modified_base 5: mod_base = OTHER; note = 2'-O-methyluridine-3'-phosphate
  modified_base 6: mod_base = OTHER; note = 2'-O-hexadecyl-guanosine-3'-phosphate
  modified_base 7: mod_base = OTHER; note = 2'-deoxy-2'-fluorocytidine-3'-phosphate
  modified_base 8: mod_base = OTHER; note = 2'-O-methyluridine-3'-phosphate
  modified_base 9: mod_base = OTHER; note = 2'-deoxy-2'-fluoroguanosine-3'-phosphate
  modified_base 10: mod_base = OTHER; note = 2'-deoxy-2'-fluorocytidine-3'-phosphate
  modified_base 11: mod_base = OTHER; note = 2'-deoxy-2'-fluorouridine-3'-phosphate
  modified_base 12: mod_base = OTHER; note = 2'-O-methyladenosine-3'-phosphate
  modified_base 13: mod_base = OTHER; note = 2'-O-methylcytidine-3'-phosphate
  modified_base 14: mod_base = OTHER; note = 2'-O-methyluridine-3'-phosphate
  modified_base 15: mod_base = OTHER; note = 2'-O-methylguanosine-3'-phosphate
  modified_base 16: mod_base = OTHER; note = 2'-O-methylguanosine-3'-phosphate
  modified_base 17: mod_base = OTHER; note = 2'-O-methylguanosine-3'-phosphate
  modified_base 18: mod_base = OTHER; note = 2'-O-methylcytidine-3'-phosphate
  modified_base 19: mod_base = OTHER; note = 2'-O-methyluridine-3'-phosphorothioate
  modified_base 20: mod_base = OTHER; note = 2'-O-methylguanosine-3'-phosphorothioate
  modified_base 21: mod_base = OTHER; note = 2'-O-methyladenosine
gtggtgctgctactgggctga

SEQ ID NO: 313 - RNA, 21 nt, synthetic construct
  source 1..21: mol_type = other RNA
  modified_base 1: mod_base = OTHER; note = 2'-O-methylcytidine-3'-phosphorothioate
  modified_base 2: mod_base = OTHER; note = 2'-O-methyluridine-3'-phosphorothioate
  modified_base 3: mod_base = OTHER; note = 2'-O-methyladenosine-3'-phosphate
  modified_base 4: mod_base = OTHER; note = 2'-O-methylcytidine-3'-phosphate
  modified_base 5: mod_base = OTHER; note = 2'-O-methyluridine-3'-phosphate
  modified_base 6: mod_base = OTHER; note = 2'-O-hexadecyl-guanosine-3'-phosphate
  modified_base 7: mod_base = OTHER; note = 2'-deoxy-2'-fluoroguanosine-3'-phosphate
  modified_base 8: mod_base = OTHER; note = 2'-O-methylguanosine-3'-phosphate
  modified_base 9: mod_base = OTHER; note = 2'-deoxy-2'-fluorocytidine-3'-phosphate
  modified_base 10: mod_base = OTHER; note = 2'-deoxy-2'-fluorouridine-3'-phosphate
  modified_base 11: mod_base = OTHER; note = 2'-deoxy-2'-fluoroguanosine-3'-phosphate
  modified_base 12: mod_base = OTHER; note = 2'-O-methylguanosine-3'-phosphate
  modified_base 13: mod_base = OTHER; note = 2'-O-methylcytidine-3'-phosphate
  modified_base 14: mod_base = OTHER; note = 2'-O-methyluridine-3'-phosphate
  modified_base 15: mod_base = OTHER; note = 2'-O-methylguanosine-3'-phosphate
  modified_base 16: mod_base = OTHER; note = 2'-O-methyluridine-3'-phosphate
  modified_base 17: mod_base = OTHER; note = 2'-O-methyluridine-3'-phosphate
  modified_base 18: mod_base = OTHER; note = 2'-O-methyluridine-3'-phosphate
  modified_base 19: mod_base = OTHER; note = 2'-O-methylguanosine-3'-phosphorothioate
  modified_base 20: mod_base = OTHER; note = 2'-O-methylcytidine-3'-phosphorothioate
  modified_base 21: mod_base = OTHER; note = 2'-O-methyladenosine
ctactgggctggctgtttgca

SEQ ID NO: 314 - RNA, 21 nt, synthetic construct
  source 1..21: mol_type = other RNA
  modified_base 1: mod_base = OTHER; note = 2'-O-methyluridine-3'-phosphorothioate
  modified_base 2: mod_base = OTHER; note = 2'-O-methylguanosine-3'-phosphorothioate
  modified_base 3: mod_base = OTHER; note = 2'-O-methylguanosine-3'-phosphate
  modified_base 4: mod_base = OTHER; note = 2'-O-methylcytidine-3'-phosphate
  modified_base 5: mod_base = OTHER; note = 2'-O-methyluridine-3'-phosphate
  modified_base 6: mod_base = OTHER; note = 2'-O-hexadecyl-guanosine-3'-phosphate
  modified_base 7: mod_base = OTHER; note = 2'-deoxy-2'-fluorouridine-3'-phosphate
  modified_base 8: mod_base = OTHER; note = 2'-O-methyluridine-3'-phosphate
  modified_base 9: mod_base = OTHER; note = 2'-deoxy-2'-fluorouridine-3'-phosphate
  modified_base 10: mod_base = OTHER; note = 2'-deoxy-2'-fluoroguanosine-3'-phosphate
  modified_base 11: mod_base = OTHER; note = 2'-deoxy-2'-fluorocytidine-3'-phosphate
  modified_base 12: mod_base = OTHER; note = 2'-O-methyladenosine-3'-phosphate
  modified_base 13: mod_base = OTHER; note = 2'-O-methylcytidine-3'-phosphate
  modified_base 14: mod_base = OTHER; note = 2'-O-methylcytidine-3'-phosphate
  modified_base 15: mod_base = OTHER; note = 2'-O-methylcytidine-3'-phosphate
  modified_base 16: mod_base = OTHER; note = 2'-O-methylguanosine-3'-phosphate
  modified_base 17: mod_base = OTHER; note = 2'-O-methyluridine-3'-phosphate
  modified_base 18: mod_base = OTHER; note = 2'-O-methylguanosine-3'-phosphate
  modified_base 19: mod_base = OTHER; note = 2'-O-methyluridine-3'-phosphorothioate
  modified_base 20: mod_base = OTHER; note = 2'-O-methyladenosine-3'-phosphorothioate
  modified_base 21: mod_base = OTHER; note = 2'-O-methyladenosine
tggctgtttgcacccgtgtaa

SEQ ID NO: 315 - RNA, 21 nt, synthetic construct
  source 1..21: mol_type = other RNA
  modified_base 1: mod_base = OTHER; note = 2'-O-methylcytidine-3'-phosphorothioate
  modified_base 2: mod_base = OTHER; note = 2'-O-methyladenosine-3'-phosphorothioate
  modified_base 3: mod_base = OTHER; note = 2'-O-methylcytidine-3'-phosphate
  modified_base 4: mod_base = OTHER; note = 2'-O-methylcytidine-3'-phosphate
  modified_base 5: mod_base = OTHER; note = 2'-O-methylcytidine-3'-phosphate
  modified_base 6: mod_base = OTHER; note = 2'-O-hexadecyl-guanosine-3'-phosphate
  modified_base 7: mod_base = OTHER; note = 2'-deoxy-2'-fluorouridine-3'-phosphate
  modified_base 8: mod_base = OTHER; note = 2'-O-methylguanosine-3'-phosphate
  modified_base 9: mod_base = OTHER; note = 2'-deoxy-2'-fluorouridine-3'-phosphate
  modified_base 10: mod_base = OTHER; note = 2'-deoxy-2'-fluoroadenosine-3'-phosphate
  modified_base 11: mod_base = OTHER; note = 2'-deoxy-2'-fluorocytidine-3'-phosphate
  modified_base 12: mod_base = OTHER; note = 2'-O-methylcytidine-3'-phosphate
  modified_base 13: mod_base = OTHER; note = 2'-O-methyluridine-3'-phosphate
  modified_base 14: mod_base = OTHER; note = 2'-O-methylguanosine-3'-phosphate
  modified_base 15: mod_base = OTHER; note = 2'-O-methyladenosine-3'-phosphate
  modified_base 16: mod_base = OTHER; note = 2'-O-methylcytidine-3'-phosphate
  modified_base 17: mod_base = OTHER; note = 2'-O-methyladenosine-3'-phosphate
  modified_base 18: mod_base = OTHER; note = 2'-O-methylguanosine-3'-phosphate
  modified_base 19: mod_base = OTHER; note = 2'-O-methylcytidine-3'-phosphorothioate
  modified_base 20: mod_base = OTHER; note = 2'-O-methylguanosine-3'-phosphorothioate
  modified_base 21: mod_base = OTHER; note = 2'-O-methyladenosine
cacccgtgtacctgacagcga

SEQ ID NO: 316 - RNA, 21 nt, synthetic construct
  source 1..21: mol_type = other RNA
  modified_base 1: mod_base = OTHER; note = 2'-O-methylguanosine-3'-phosphorothioate
  modified_base 2: mod_base = OTHER; note = 2'-O-methyluridine-3'-phosphorothioate
  modified_base 3: mod_base = OTHER; note = 2'-O-methylcytidine-3'-phosphate
  modified_base 4: mod_base = OTHER; note = 2'-O-methyladenosine-3'-phosphate
  modified_base 5: mod_base = OTHER; note = 2'-O-methyluridine-3'-phosphate
  modified_base 6: mod_base = OTHER; note = 2'-O-hexadecyl-cytidine-3'-phosphate
  modified_base 7: mod_base = OTHER; note = 2'-deoxy-2'-fluoroadenosine-3'-phosphate
  modified_base 8: mod_base = OTHER; note = 2'-O-methylcytidine-3'-phosphate
  modified_base 9: mod_base = OTHER; note = 2'-deoxy-2'-fluoroguanosine-3'-phosphate
  modified_base 10: mod_base = OTHER; note = 2'-deoxy-2'-fluoroadenosine-3'-phosphate
  modified_base 11: mod_base = OTHER; note = 2'-deoxy-2'-fluorouridine-3'-phosphate
  modified_base 12: mod_base = OTHER; note = 2'-O-methylguanosine-3'-phosphate
  modified_base 13: mod_base = OTHER; note = 2'-O-methylcytidine-3'-phosphate
  modified_base 14: mod_base = OTHER; note = 2'-O-methylcytidine-3'-phosphate
  modified_base 15: mod_base = OTHER; note = 2'-O-methyladenosine-3'-phosphate
  modified_base 16: mod_base = OTHER; note = 2'-O-methylcytidine-3'-phosphate
  modified_base 17: mod_base = OTHER; note = 2'-O-methyladenosine-3'-phosphate
  modified_base 18: mod_base = OTHER; note = 2'-O-methylguanosine-3'-phosphate
  modified_base 19: mod_base = OTHER; note = 2'-O-methyluridine-3'-phosphorothioate
  modified_base 20: mod_base = OTHER; note = 2'-O-methyladenosine-3'-phosphorothioate
  modified_base 21: mod_base = OTHER; note = 2'-O-methyladenosine
gtcatcacgatgccacagtaa

SEQ ID NO: 317 - RNA, 21 nt, synthetic construct
  source 1..21: mol_type = other RNA
  modified_base 1: mod_base = OTHER; note = 2'-O-methyladenosine-3'-phosphorothioate
  modified_base 2: mod_base = OTHER; note = 2'-O-methyluridine-3'-phosphorothioate
  modified_base 3: mod_base = OTHER; note = 2'-O-methylguanosine-3'-phosphate
  modified_base 4: mod_base = OTHER; note = 2'-O-methylcytidine-3'-phosphate
  modified_base 5: mod_base = OTHER; note = 2'-O-methylcytidine-3'-phosphate
  modified_base 6: mod_base = OTHER; note = 2'-O-hexadecyl-adenosine-3'-phosphate
  modified_base 7: mod_base = OTHER; note = 2'-deoxy-2'-fluorocytidine-3'-phosphate
  modified_base 8: mod_base = OTHER; note = 2'-O-methyladenosine-3'-phosphate
  modified_base 9: mod_base = OTHER; note = 2'-deoxy-2'-fluoroguanosine-3'-phosphate
  modified_base 10: mod_base = OTHER; note = 2'-deoxy-2'-fluorouridine-3'-phosphate
  modified_base 11: mod_base = OTHER; note = 2'-deoxy-2'-fluoroadenosine-3'-phosphate
  modified_base 12: mod_base = OTHER; note = 2'-O-methylcytidine-3'-phosphate
  modified_base 13: mod_base = OTHER; note = 2'-O-methylcytidine-3'-phosphate
  modified_base 14: mod_base = OTHER; note = 2'-O-methyluridine-3'-phosphate
  modified_base 15: mod_base = OTHER; note = 2'-O-methylguanosine-3'-phosphate
  modified_base 16: mod_base = OTHER; note = 2'-O-methylcytidine-3'-phosphate
  modified_base 17: mod_base = OTHER; note = 2'-O-methylguanosine-3'-phosphate
  modified_base 18: mod_base = OTHER; note = 2'-O-methylcytidine-3'-phosphate
  modified_base 19: mod_base = OTHER; note = 2'-O-methyladenosine-3'-phosphorothioate
  modified_base 20: mod_base = OTHER; note = 2'-O-methyladenosine-3'-phosphorothioate
  modified_base 21: mod_base = OTHER; note = 2'-O-methyladenosine
atgccacagtacctgcgcaaa

SEQ ID NO: 318 - RNA, 21 nt, synthetic construct
  source 1..21: mol_type = other RNA
  modified_base 1: mod_base = OTHER; note = 2'-O-methyluridine-3'-phosphorothioate
  modified_base 2: mod_base = OTHER; note = 2'-O-methyladenosine-3'-phosphorothioate
  modified_base 3: mod_base = OTHER; note = 2'-O-methylcytidine-3'-phosphate
  modified_base 4: mod_base = OTHER; note = 2'-O-methylcytidine-3'-phosphate
  modified_base 5: mod_base = OTHER; note = 2'-O-methyluridine-3'-phosphate
  modified_base 6: mod_base = OTHER; note = 2'-O-hexadecyl-guanosine-3'-phosphate
  modified_base 7: mod_base = OTHER; note = 2'-deoxy-2'-fluorocytidine-3'-phosphate
  modified_base 8: mod_base = OTHER; note = 2'-O-methylguanosine-3'-phosphate
  modified_base 9: mod_base = OTHER; note = 2'-deoxy-2'-fluorocytidine-3'-phosphate
  modified_base 10: mod_base = OTHER; note = 2'-deoxy-2'-fluoroadenosine-3'-phosphate
  modified_base 11: mod_base = OTHER; note = 2'-deoxy-2'-fluoroadenosine-3'-phosphate
  modified_base 12: mod_base = OTHER; note = 2'-O-methylguanosine-3'-phosphate
  modified_base 13: mod_base = OTHER; note = 2'-O-methylcytidine-3'-phosphate
  modified_base 14: mod_base = OTHER; note = 2'-O-methylguanosine-3'-phosphate
  modified_base 15: mod_base = OTHER; note = 2'-O-methylcytidine-3'-phosphate
  modified_base 16: mod_base = OTHER; note = 2'-O-methyluridine-3'-phosphate
  modified_base 17: mod_base = OTHER; note = 2'-O-methyluridine-3'-phosphate
  modified_base 18: mod_base = OTHER; note = 2'-O-methylcytidine-3'-phosphate
  modified_base 19: mod_base = OTHER; note = 2'-O-methylguanosine-3'-phosphorothioate
  modified_base 20: mod_base = OTHER; note = 2'-O-methylguanosine-3'-phosphorothioate
  modified_base 21: mod_base = OTHER; note = 2'-O-methyladenosine
tacctgcgcaagcgcttcgga

SEQ ID NO: 319 - RNA, 21 nt, synthetic construct
  source 1..21: mol_type = other RNA
  modified_base 1: mod_base = OTHER; note = 2'-O-methylcytidine-3'-phosphorothioate
  modified_base 2: mod_base = OTHER; note = 2'-O-methylcytidine-3'-phosphorothioate
  modified_base 3: mod_base = OTHER; note = 2'-O-methyluridine-3'-phosphate
  modified_base 4: mod_base = OTHER; note = 2'-O-methylcytidine-3'-phosphate
  modified_base 5: mod_base = OTHER; note = 2'-O-methyluridine-3'-phosphate
  modified_base 6: mod_base = OTHER; note = 2'-O-hexadecyl-adenosine-3'-phosphate
  modified_base 7: mod_base = OTHER; note = 2'-deoxy-2'-fluorocytidine-3'-phosphate
  modified_base 8: mod_base = OTHER; note = 2'-O-methylcytidine-3'-phosphate
  modified_base 9: mod_base = OTHER; note = 2'-deoxy-2'-fluorouridine-3'-phosphate
  modified_base 10: mod_base = OTHER; note = 2'-deoxy-2'-fluoroguanosine-3'-phosphate
  modified_base 11: mod_base = OTHER; note = 2'-deoxy-2'-fluorouridine-3'-phosphate
  modified_base 12: mod_base = OTHER; note = 2'-O-methylcytidine-3'-phosphate
  modified_base 13: mod_base = OTHER; note = 2'-O-methyluridine-3'-phosphate
  modified_base 14: mod_base = OTHER; note = 2'-O-methylguanosine-3'-phosphate
  modified_base 15: mod_base = OTHER; note = 2'-O-methyluridine-3'-phosphate
  modified_base 16: mod_base = OTHER; note = 2'-O-methylguanosine-3'-phosphate
  modified_base 17: mod_base = OTHER; note = 2'-O-methylcytidine-3'-phosphate
  modified_base 18: mod_base = OTHER; note = 2'-O-methyluridine-3'-phosphate
  modified_base 19: mod_base = OTHER; note = 2'-O-methylcytidine-3'-phosphorothioate
  modified_base 20: mod_base = OTHER; note = 2'-O-methyluridine-3'-phosphorothioate
  modified_base 21: mod_base = OTHER; note = 2'-O-methyladenosine
cctctacctgtctgtgctcta

SEQ ID NO: 320 - RNA, 21 nt, synthetic construct
  source 1..21: mol_type = other RNA
  modified_base 1: mod_base = OTHER; note = 2'-O-methyluridine-3'-phosphorothioate
  modified_base 2: mod_base = OTHER; note = 2'-O-methylguanosine-3'-phosphorothioate
  modified_base 3: mod_base = OTHER; note = 2'-O-methyluridine-3'-phosphate
  modified_base 4: mod_base = OTHER; note = 2'-O-methylguanosine-3'-phosphate
  modified_base 5: mod_base = OTHER; note = 2'-O-methylcytidine-3'-phosphate
  modified_base 6: mod_base = OTHER; note = 2'-O-hexadecyl-uridine-3'-phosphate
  modified_base 7: mod_base = OTHER; note = 2'-deoxy-2'-fluorocytidine-3'-phosphate
  modified_base 8: mod_base = OTHER; note = 2'-O-methyluridine-3'-phosphate
  modified_base 9: mod_base = OTHER; note = 2'-deoxy-2'-fluorocytidine-3'-phosphate
  modified_base 10: mod_base = OTHER; note = 2'-deoxy-2'-fluorocytidine-3'-phosphate
  modified_base 11: mod_base = OTHER; note = 2'-deoxy-2'-fluorocytidine-3'-phosphate
  modified_base 12: mod_base = OTHER; note = 2'-O-methyluridine-3'-phosphate
  modified_base 13: mod_base = OTHER; note = 2'-O-methyluridine-3'-phosphate
  modified_base 14: mod_base = OTHER; note = 2'-O-methyluridine-3'-phosphate
  modified_base 15: mod_base = OTHER; note = 2'-O-methyluridine-3'-phosphate
  modified_base 16: mod_base = OTHER; note = 2'-O-methylcytidine-3'-phosphate
  modified_base 17: mod_base = OTHER; note = 2'-O-methylcytidine-3'-phosphate
  modified_base 18: mod_base = OTHER; note = 2'-O-methyluridine-3'-phosphate
  modified_base 19: mod_base = OTHER; note = 2'-O-methylguanosine-3'-phosphorothioate
  modified_base 20: mod_base = OTHER; note = 2'-O-methyluridine-3'-phosphorothioate
  modified_base 21: mod_base = OTHER; note = 2'-O-methyladenosine
tgtgctctcccttttcctgta

SEQ ID NO: 321 - RNA, 21 nt, synthetic construct
  source 1..21: mol_type = other RNA
  modified_base 1: mod_base = OTHER; note = 2'-O-methylcytidine-3'-phosphorothioate
  modified_base 2: mod_base = OTHER; note = 2'-O-methylcytidine-3'-phosphorothioate
  modified_base 3: mod_base = OTHER; note = 2'-O-methyluridine-3'-phosphate
  modified_base 4: mod_base = OTHER; note = 2'-O-methyluridine-3'-phosphate
  modified_base 5: mod_base = OTHER; note = 2'-O-methyluridine-3'-phosphate
  modified_base 6: mod_base = OTHER; note = 2'-O-hexadecyl-uridine-3'-phosphate
  modified_base 7: mod_base = OTHER; note = 2'-deoxy-2'-fluorocytidine-3'-phosphate
  modified_base 8: mod_base = OTHER; note = 2'-O-methylcytidine-3'-phosphate
  modified_base 9: mod_base = OTHER; note = 2'-deoxy-2'-fluorouridine-3'-phosphate
  modified_base 10: mod_base = OTHER; note = 2'-deoxy-2'-fluoroguanosine-3'-phosphate
  modified_base 11: mod_base = OTHER; note = 2'-deoxy-2'-fluorouridine-3'-phosphate
  modified_base 12: mod_base = OTHER; note = 2'-O-methyladenosine-3'-phosphate
  modified_base 13: mod_base = OTHER; note = 2'-O-methylcytidine-3'-phosphate
  modified_base 14: mod_base = OTHER; note = 2'-O-methyladenosine-3'-phosphate
  modified_base 15: mod_base = OTHER; note = 2'-O-methyluridine-3'-phosphate
  modified_base 16: mod_base = OTHER; note = 2'-O-methylcytidine-3'-phosphate
  modified_base 17: mod_base = OTHER; note = 2'-O-methyluridine-3'-phosphate
  modified_base 18: mod_base = OTHER; note = 2'-O-methyluridine-3'-phosphate
  modified_base 19: mod_base = OTHER; note = 2'-O-methylcytidine-3'-phosphorothioate
  modified_base 20: mod_base = OTHER; note = 2'-O-methyladenosine-3'-phosphorothioate
  modified_base 21: mod_base = OTHER; note = 2'-O-methyladenosine
ccttttcctgtacatcttcaa

SEQ ID NO: 322 - RNA, 21 nt, synthetic construct
  source 1..21: mol_type = other RNA
  modified_base 1: mod_base = OTHER; note = 2'-O-methylguanosine-3'-phosphorothioate
  modified_base 2: mod_base = OTHER; note = 2'-O-methyluridine-3'-phosphorothioate
  modified_base 3: mod_base = OTHER; note = 2'-O-methyladenosine-3'-phosphate
  modified_base 4: mod_base = OTHER; note = 2'-O-methylcytidine-3'-phosphate
  modified_base 5: mod_base = OTHER; note = 2'-O-methyladenosine-3'-phosphate
  modified_base 6: mod_base = OTHER; note = 2'-O-hexadecyl-uridine-3'-phosphate
  modified_base 7: mod_base = OTHER; note = 2'-deoxy-2'-fluorocytidine-3'-phosphate
  modified_base 8: mod_base = OTHER; note = 2'-O-methyluridine-3'-phosphate
  modified_base 9: mod_base = OTHER; note = 2'-deoxy-2'-fluorouridine-3'-phosphate
  modified_base 10: mod_base = OTHER; note = 2'-deoxy-2'-fluorocytidine-3'-phosphate
  modified_base 11: mod_base = OTHER; note = 2'-deoxy-2'-fluoroadenosine-3'-phosphate
  modified_base 12: mod_base = OTHER; note = 2'-O-methylcytidine-3'-phosphate
  modified_base 13: mod_base = OTHER; note = 2'-O-methylcytidine-3'-phosphate
  modified_base 14: mod_base = OTHER; note = 2'-O-methyladenosine-3'-phosphate
  modified_base 15: mod_base = OTHER; note = 2'-O-methyladenosine-3'-phosphate
  modified_base 16: mod_base = OTHER; note = 2'-O-methylguanosine-3'-phosphate
  modified_base 17: mod_base = OTHER; note = 2'-O-methyladenosine-3'-phosphate
  modified_base 18: mod_base = OTHER; note = 2'-O-methyluridine-3'-phosphate
  modified_base 19: mod_base = OTHER; note = 2'-O-methylcytidine-3'-phosphorothioate
  modified_base 20: mod_base = OTHER; note = 2'-O-methyluridine-3'-phosphorothioate
  modified_base 21: mod_base = OTHER; note = 2'-O-methyladenosine
gtacatcttcaccaagatcta

SEQ ID NO: 323 - RNA, 21 nt, synthetic construct
  source 1..21: mol_type = other RNA
  modified_base 1: mod_base = OTHER; note = 2'-O-methyladenosine-3'-phosphorothioate
  modified_base 2: mod_base = OTHER; note = 2'-O-methyladenosine-3'-phosphorothioate
  modified_base 3: mod_base = OTHER; note = 2'-O-methylguanosine-3'-phosphate
  modified_base 4: mod_base = OTHER; note = 2'-O-methyladenosine-3'-phosphate
  modified_base 5: mod_base = OTHER; note = 2'-O-methyluridine-3'-phosphate
  modified_base 6: mod_base = OTHER; note = 2'-O-hexadecyl-cytidine-3'-phosphate
  modified_base 7: mod_base = OTHER; note = 2'-deoxy-2'-fluorouridine-3'-phosphate
  modified_base 8: mod_base = OTHER; note = 2'-O-methylcytidine-3'-phosphate
  modified_base 9: mod_base = OTHER; note = 2'-deoxy-2'-fluoroadenosine-3'-phosphate
  modified_base 10: mod_base = OTHER; note = 2'-deoxy-2'-fluoroguanosine-3'-phosphate
  modified_base 11: mod_base = OTHER; note = 2'-deoxy-2'-fluorouridine-3'-phosphate
  modified_base 12: mod_base = OTHER; note = 2'-O-methylguanosine-3'-phosphate
  modified_base 13: mod_base = OTHER; note = 2'-O-methylguanosine-3'-phosphate
  modified_base 14: mod_base = OTHER; note = 2'-O-methyladenosine-3'-phosphate
  modified_base 15: mod_base = OTHER; note = 2'-O-methylcytidine-3'-phosphate
  modified_base 16: mod_base = OTHER; note = 2'-O-methyladenosine-3'-phosphate
  modified_base 17: mod_base = OTHER; note = 2'-O-methyluridine-3'-phosphate
  modified_base 18: mod_base = OTHER; note = 2'-O-methylguanosine-3'-phosphate
  modified_base 19: mod_base = OTHER; note = 2'-O-methyluridine-3'-phosphorothioate
  modified_base 20: mod_base = OTHER; note = 2'-O-methyluridine-3'-phosphorothioate
  modified_base 21: mod_base = OTHER; note = 2'-O-methyladenosine
aagatctcagtggacatgtta

SEQ ID NO: 324 - RNA, 21 nt, synthetic construct
  source 1..21: mol_type = other RNA
  modified_base 1: mod_base = OTHER; note = 2'-O-methyluridine-3'-phosphorothioate
  modified_base 2: mod_base = OTHER; note = 2'-O-methylguanosine-3'-phosphorothioate
  modified_base 3: mod_base = OTHER; note = 2'-O-methylguanosine-3'-phosphate
  modified_base 4: mod_base = OTHER; note = 2'-O-methyladenosine-3'-phosphate
  modified_base 5: mod_base = OTHER; note = 2'-O-methylcytidine-3'-phosphate
  modified_base 6: mod_base = OTHER; note = 2'-O-hexadecyl-adenosine-3'-phosphate
  modified_base 7: mod_base = OTHER; note = 2'-deoxy-2'-fluorouridine-3'-phosphate
  modified_base 8: mod_base = OTHER; note = 2'-O-methylguanosine-3'-phosphate
  modified_base 9: mod_base = OTHER; note = 2'-deoxy-2'-fluorouridine-3'-phosphate
  modified_base 10: mod_base = OTHER; note = 2'-deoxy-2'-fluorouridine-3'-phosphate
  modified_base 11: mod_base = OTHER; note = 2'-deoxy-2'-fluorocytidine-3'-phosphate
  modified_base 12: mod_base = OTHER; note = 2'-O-methyluridine-3'-phosphate
  modified_base 13: mod_base = OTHER; note = 2'-O-methylcytidine-3'-phosphate
  modified_base 14: mod_base = OTHER; note = 2'-O-methylcytidine-3'-phosphate
  modified_base 15: mod_base = OTHER; note = 2'-O-methylguanosine-3'-phosphate
  modified_base 16: mod_base = OTHER; note = 2'-O-methylguanosine-3'-phosphate
  modified_base 17: mod_base = OTHER; note = 2'-O-methyladenosine-3'-phosphate
  modified_base 18: mod_base = OTHER; note = 2'-O-methylguanosine-3'-phosphate
  modified_base 19: mod_base = OTHER; note = 2'-O-methylcytidine-3'-phosphorothioate
  modified_base 20: mod_base = OTHER; note = 2'-O-methyluridine-3'-phosphorothioate
  modified_base 21: mod_base = OTHER; note = 2'-O-methyladenosine
tggacatgttctccggagcta

SEQ ID NO: 325 - RNA, 21 nt, synthetic construct
  source 1..21: mol_type = other RNA
  modified_base 1: mod_base = OTHER; note = 2'-O-methylcytidine-3'-phosphorothioate
  modified_base 2: mod_base = OTHER; note = 2'-O-methylcytidine-3'-phosphorothioate
  modified_base 3: mod_base = OTHER; note = 2'-O-methylguanosine-3'-phosphate
  modified_base 4: mod_base = OTHER; note = 2'-O-methylguanosine-3'-phosphate
  modified_base 5: mod_base = OTHER; note = 2'-O-methyladenosine-3'-phosphate
  modified_base 6: mod_base = OTHER; note = 2'-O-hexadecyl-guanosine-3'-phosphate
  modified_base 7: mod_base = OTHER; note = 2'-deoxy-2'-fluorocytidine-3'-phosphate
  modified_base 8: mod_base = OTHER; note = 2'-O-methyluridine-3'-phosphate
  modified_base 9: mod_base = OTHER; note = 2'-deoxy-2'-fluoroguanosine-3'-phosphate
  modified_base 10: mod_base = OTHER; note = 2'-deoxy-2'-fluorouridine-3'-phosphate
  modified_base 11: mod_base = OTHER; note = 2'-deoxy-2'-fluoroadenosine-3'-phosphate
  modified_base 12: mod_base = OTHER; note = 2'-O-methyluridine-3'-phosphate
  modified_base 13: mod_base = OTHER; note = 2'-O-methyluridine-3'-phosphate
  modified_base 14: mod_base = OTHER; note = 2'-O-methylcytidine-3'-phosphate
  modified_base 15: mod_base = OTHER; note = 2'-O-methyladenosine-3'-phosphate
  modified_base 16: mod_base = OTHER; note = 2'-O-methyluridine-3'-phosphate
  modified_base 17: mod_base = OTHER; note = 2'-O-methylcytidine-3'-phosphate
  modified_base 18: mod_base = OTHER; note = 2'-O-methylcytidine-3'-phosphate
  modified_base 19: mod_base = OTHER; note = 2'-O-methyladenosine-3'-phosphorothioate
  modified_base 20: mod_base = OTHER; note = 2'-O-methylguanosine-3'-phosphorothioate
  modified_base 21: mod_base = OTHER; note = 2'-O-methyladenosine
ccggagctgtattcatccaga

SEQ ID NO: 326 - RNA, 21 nt, synthetic construct
  source 1..21: mol_type = other RNA
  modified_base 1: mod_base = OTHER; note = 2'-O-methyladenosine-3'-phosphorothioate
  modified_base 2: mod_base = OTHER; note = 2'-O-methyluridine-3'-phosphorothioate
  modified_base 3: mod_base = OTHER; note = 2'-O-methylcytidine-3'-phosphate
  modified_base 4: mod_base = OTHER; note = 2'-O-methylcytidine-3'-phosphate
  modified_base 5: mod_base = OTHER; note = 2'-O-methyladenosine-3'-phosphate
  modified_base 6: mod_base = OTHER; note = 2'-O-hexadecyl-guanosine-3'-phosphate
  modified_base 7: mod_base = OTHER; note = 2'-deoxy-2'-fluorocytidine-3'-phosphate
  modified_base 8: mod_base = OTHER; note = 2'-O-methyladenosine-3'-phosphate
  modified_base 9: mod_base = OTHER; note = 2'-deoxy-2'-fluoroguanosine-3'-phosphate
  modified_base 10: mod_base = OTHER; note = 2'-deoxy-2'-fluoroguanosine-3'-phosphate
  modified_base 11: mod_base = OTHER; note = 2'-deoxy-2'-fluorocytidine-3'-phosphate
  modified_base 12: mod_base = OTHER; note = 2'-O-methyluridine-3'-phosphate
  modified_base 13: mod_base = OTHER; note = 2'-O-methylcytidine-3'-phosphate
  modified_base 14: mod_base = OTHER; note = 2'-O-methyluridine-3'-phosphate
  modified_base 15: mod_base = OTHER; note = 2'-O-methylguanosine-3'-phosphate
  modified_base 16: mod_base = OTHER; note = 2'-O-methylguanosine-3'-phosphate
  modified_base 17: mod_base = OTHER; note = 2'-O-methylguanosine-3'-phosphate
  modified_base 18: mod_base = OTHER; note = 2'-O-methylcytidine-3'-phosphate
  modified_base 19: mod_base = OTHER; note = 2'-O-methyluridine-3'-phosphorothioate
  modified_base 20: mod_base = OTHER; note = 2'-O-methylguanosine-3'-phosphorothioate
  modified_base 21: mod_base = OTHER; note = 2'-O-methyladenosine
atccagcaggctctgggctga

SEQ ID NO: 327 - RNA, 21 nt, synthetic construct
  source 1..21: mol_type = other RNA
  modified_base 1: mod_base = OTHER; note = 2'-O-methylguanosine-3'-phosphorothioate
  modified_base 2: mod_base = OTHER; note = 2'-O-methylguanosine-3'-phosphorothioate
  modified_base 3: mod_base = OTHER; note = 2'-O-methylguanosine-3'-phosphate
  modified_base 4: mod_base = OTHER; note = 2'-O-methylcytidine-3'-phosphate
  modified_base 5: mod_base = OTHER; note = 2'-O-methyluridine-3'-phosphate
  modified_base 6: mod_base = OTHER; note = 2'-O-hexadecyl-guanosine-3'-phosphate
  modified_base 7: mod_base = OTHER; note = 2'-deoxy-2'-fluoroguanosine-3'-phosphate
  modified_base 8: mod_base = OTHER; note = 2'-O-methyladenosine-3'-phosphate
  modified_base 9: mod_base = OTHER; note = 2'-deoxy-2'-fluoroadenosine-3'-phosphate
  modified_base 10: mod_base = OTHER; note = 2'-deoxy-2'-fluorocytidine-3'-phosphate
  modified_base 11: mod_base = OTHER; note = 2'-deoxy-2'-fluoroadenosine-3'-phosphate
  modified_base 12: mod_base = OTHER; note = 2'-O-methyluridine-3'-phosphate
  modified_base 13: mod_base = OTHER; note = 2'-O-methylcytidine-3'-phosphate
  modified_base 14: mod_base = OTHER; note = 2'-O-methyluridine-3'-phosphate
  modified_base 15: mod_base = OTHER; note = 2'-O-methyladenosine-3'-phosphate
  modified_base 16: mod_base = OTHER; note = 2'-O-methyluridine-3'-phosphate
  modified_base 17: mod_base = OTHER; note = 2'-O-methylguanosine-3'-phosphate
  modified_base 18: mod_base = OTHER; note = 2'-O-methylcytidine-3'-phosphate
  modified_base 19: mod_base = OTHER; note = 2'-O-methylcytidine-3'-phosphorothioate
  modified_base 20: mod_base = OTHER; note = 2'-O-methyluridine-3'-phosphorothioate
  modified_base 21: mod_base = OTHER; note = 2'-O-methyladenosine
gggctggaacatctatgccta

SEQ ID NO: 328 - RNA, 21 nt, synthetic construct
  source 1..21: mol_type = other RNA
  modified_base 1: mod_base = OTHER; note = 2'-O-methylcytidine-3'-phosphorothioate
  modified_base 2: mod_base = OTHER; note = 2'-O-methylcytidine-3'-phosphorothioate
  modified_base 3: mod_base = OTHER; note = 2'-O-methyluridine-3'-phosphate
  modified_base 4: mod_base = OTHER; note = 2'-O-methylcytidine-3'-phosphate
  modified_base 5: mod_base = OTHER; note = 2'-O-methylcytidine-3'-phosphate
  modified_base 6: mod_base = OTHER; note = 2'-O-hexadecyl-guanosine-3'-phosphate
  modified_base 7: mod_base = OTHER; note = 2'-deoxy-2'-fluorouridine-3'-phosphate
  modified_base 8: mod_base = OTHER; note = 2'-O-methylcytidine-3'-phosphate
  modified_base 9: mod_base = OTHER; note = 2'-deoxy-2'-fluoroadenosine-3'-phosphate
  modified_base 10: mod_base = OTHER; note = 2'-deoxy-2'-fluorouridine-3'-phosphate
  modified_base 11: mod_base = OTHER; note = 2'-deoxy-2'-fluorocytidine-3'-phosphate
  modified_base 12: mod_base = OTHER; note = 2'-O-methylguanosine-3'-phosphate
  modified_base 13: mod_base = OTHER; note = 2'-O-methylcytidine-3'-phosphate
  modified_base 14: mod_base = OTHER; note = 2'-O-methylguanosine-3'-phosphate
  modified_base 15: mod_base = OTHER; note = 2'-O-methylcytidine-3'-phosphate
  modified_base 16: mod_base = OTHER; note = 2'-O-methyluridine-3'-phosphate
  modified_base 17: mod_base = OTHER; note = 2'-O-methyluridine-3'-phosphate
  modified_base 18: mod_base = OTHER; note = 2'-O-methylcytidine-3'-phosphate
  modified_base 19: mod_base = OTHER; note = 2'-O-methyluridine-3'-phosphorothioate
  modified_base 20: mod_base = OTHER; note = 2'-O-methylguanosine-3'-phosphorothioate
  modified_base 21: mod_base = OTHER; note = 2'-O-methyladenosine
cctccgtcatcgcgcttctga

SEQ ID NO: 329 - RNA, 21 nt, synthetic construct
  source 1..21: mol_type = other RNA
  modified_base 1: mod_base = OTHER; note = 2'-O-methylcytidine-3'-phosphorothioate
  modified_base 2: mod_base = OTHER; note = 2'-O-methylguanosine-3'-phosphorothioate
  modified_base 3: mod_base = OTHER; note = 2'-O-methylcytidine-3'-phosphate
  modified_base 4: mod_base = OTHER; note = 2'-O-methylguanosine-3'-phosphate
  modified_base 5: mod_base = OTHER; note = 2'-O-methylcytidine-3'-phosphate
  modified_base 6: mod_base = OTHER; note = 2'-O-hexadecyl-uridine-3'-phosphate
  modified_base 7: mod_base = OTHER; note = 2'-deoxy-2'-fluorouridine-3'-phosphate
  modified_base 8: mod_base = OTHER; note = 2'-O-methylcytidine-3'-phosphate
  modified_base 9: mod_base = OTHER; note = 2'-deoxy-2'-fluorouridine-3'-phosphate
  modified_base 10: mod_base = OTHER; note = 2'-deoxy-2'-fluoroguanosine-3'-phosphate
  modified_base 11: mod_base = OTHER; note = 2'-deoxy-2'-fluoroguanosine-3'-phosphate
  modified_base 12: mod_base = OTHER; note = 2'-O-methylguanosine-3'-phosphate
  modified_base 13: mod_base = OTHER; note = 2'-O-methylcytidine-3'-phosphate
  modified_base 14: mod_base = OTHER; note = 2'-O-methyladenosine-3'-phosphate
  modified_base 15: mod_base = OTHER; note = 2'-O-methyluridine-3'-phosphate
  modified_base 16: mod_base = OTHER; note = 2'-O-methylcytidine-3'-phosphate
  modified_base 17: mod_base = OTHER; note = 2'-O-methyladenosine-3'-phosphate
  modified_base 18: mod_base = OTHER; note = 2'-O-methylcytidine-3'-phosphate
  modified_base 19: mod_base = OTHER; note = 2'-O-methylcytidine-3'-phosphorothioate
  modified_base 20: mod_base = OTHER; note = 2'-O-methyladenosine-3'-phosphorothioate
  modified_base 21: mod_base = OTHER; note = 2'-O-methyladenosine
cgcgcttctgggcatcaccaa

SEQ ID NO: 330 - RNA, 21 nt, synthetic construct
  source 1..21: mol_type = other RNA
  modified_base 1: mod_base = OTHER; note = 2'-O-methylguanosine-3'-phosphorothioate
  modified_base 2: mod_base = OTHER; note = 2'-O-methylguanosine-3'-phosphorothioate
  modified_base 3: mod_base = OTHER; note = 2'-O-methylguanosine-3'-phosphate
  modified_base 4: mod_base = OTHER; note = 2'-O-methylcytidine-3'-phosphate
  modified_base 5: mod_base = OTHER; note = 2'-O-methyladenosine-3'-phosphate
  modified_base 6: mod_base = OTHER; note = 2'-O-hexadecyl-uridine-3'-phosphate
  modified_base 7: mod_base = OTHER; note = 2'-deoxy-2'-fluorocytidine-3'-phosphate
  modified_base 8: mod_base = OTHER; note = 2'-O-methyladenosine-3'-phosphate
  modified_base 9: mod_base = OTHER; note = 2'-deoxy-2'-fluorocytidine-3'-phosphate
  modified_base 10: mod_base = OTHER; note = 2'-deoxy-2'-fluorocytidine-3'-phosphate
  modified_base 11: mod_base = OTHER; note = 2'-deoxy-2'-fluoroadenosine-3'-phosphate
  modified_base 12: mod_base = OTHER; note = 2'-O-methyluridine-3'-phosphate
  modified_base 13: mod_base = OTHER; note = 2'-O-methylguanosine-3'-phosphate
  modified_base 14: mod_base = OTHER; note = 2'-O-methyladenosine-3'-phosphate
  modified_base 15: mod_base = OTHER; note = 2'-O-methyluridine-3'-phosphate
  modified_base 16: mod_base = OTHER; note = 2'-O-methyluridine-3'-phosphate
  modified_base 17: mod_base = OTHER; note = 2'-O-methyluridine-3'-phosphate
  modified_base 18: mod_base = OTHER; note = 2'-O-methyladenosine-3'-phosphate
  modified_base 19: mod_base = OTHER; note = 2'-O-methylcytidine-3'-phosphorothioate
  modified_base 20: mod_base = OTHER; note = 2'-O-methyladenosine-3'-phosphorothioate
  modified_base 21: mod_base = OTHER; note = 2'-O-methyladenosine
gggcatcaccatgatttacaa

SEQ ID NO: 331 - RNA, 21 nt, synthetic construct
  source 1..21: mol_type = other RNA
  modified_base 1: mod_base = OTHER; note = 2'-O-methylcytidine-3'-phosphorothioate
  modified_base 2: mod_base = OTHER; note = 2'-O-methyladenosine-3'-phosphorothioate
  modified_base 3: mod_base = OTHER; note = 2'-O-methyluridine-3'-phosphate
  modified_base 4: mod_base = OTHER; note = 2'-O-methylguanosine-3'-phosphate
  modified_base 5: mod_base = OTHER; note = 2'-O-methyladenosine-3'-phosphate
  modified_base 6: mod_base = OTHER; note = 2'-O-hexadecyl-uridine-3'-phosphate
  modified_base 7: mod_base = OTHER; note = 2'-deoxy-2'-fluorouridine-3'-phosphate
  modified_base 8: mod_base = OTHER; note = 2'-O-methyluridine-3'-phosphate
  modified_base 9: mod_base = OTHER; note = 2'-deoxy-2'-fluoroadenosine-3'-phosphate
  modified_base 10: mod_base = OTHER; note = 2'-deoxy-2'-fluorocytidine-3'-phosphate
  modified_base 11: mod_base = OTHER; note = 2'-deoxy-2'-fluoroadenosine-3'-phosphate
  modified_base 12: mod_base = OTHER; note = 2'-O-methylcytidine-3'-phosphate
  modified_base 13: mod_base = OTHER; note = 2'-O-methylguanosine-3'-phosphate
  modified_base 14: mod_base = OTHER; note = 2'-O-methylguanosine-3'-phosphate
  modified_base 15: mod_base = OTHER; note = 2'-O-methyluridine-3'-phosphate
  modified_base 16: mod_base = OTHER; note = 2'-O-methylguanosine-3'-phosphate
  modified_base 17: mod_base = OTHER; note = 2'-O-methyladenosine-3'-phosphate
  modified_base 18: mod_base = OTHER; note = 2'-O-methylcytidine-3'-phosphate
  modified_base 19: mod_base = OTHER; note = 2'-O-methyladenosine-3'-phosphorothioate
  modified_base 20: mod_base = OTHER; note = 2'-O-methylguanosine-3'-phosphorothioate
  modified_base 21: mod_base = OTHER; note = 2'-O-methyladenosine
catgatttacacggtgacaga

SEQ ID NO: 332 - RNA, 21 nt, synthetic construct
  source 1..21: mol_type = other RNA
  modified_base 1: mod_base = OTHER; note = 2'-O-methylcytidine-3'-phosphorothioate
  modified_base 2: mod_base = OTHER; note = 2'-O-methyladenosine-3'-phosphorothioate
  modified_base 3: mod_base = OTHER; note = 2'-O-methylcytidine-3'-phosphate
  modified_base 4: mod_base = OTHER; note = 2'-O-methylguanosine-3'-phosphate
  modified_base 5: mod_base = OTHER; note = 2'-O-methylguanosine-3'-phosphate
  modified_base 6: mod_base = OTHER; note = 2'-O-hexadecyl-uridine-3'-phosphate
  modified_base 7: mod_base = OTHER; note = 2'-deoxy-2'-fluoroguanosine-3'-phosphate
  modified_base 8: mod_base = OTHER; note = 2'-O-methyladenosine-3'-phosphate
  modified_base 9: mod_base = OTHER; note = 2'-deoxy-2'-fluorocytidine-3'-phosphate
  modified_base 10: mod_base = OTHER; note = 2'-deoxy-2'-fluoroadenosine-3'-phosphate
  modified_base 11: mod_base = OTHER; note = 2'-deoxy-2'-fluoroguanosine-3'-phosphate
  modified_base 12: mod_base = OTHER; note = 2'-O-methylguanosine-3'-phosphate
  modified_base 13: mod_base = OTHER; note = 2'-O-methyladenosine-3'-phosphate
  modified_base 14: mod_base = OTHER; note = 2'-O-methylguanosine-3'-phosphate
  modified_base 15: mod_base = OTHER; note = 2'-O-methylguanosine-3'-phosphate
  modified_base 16: mod_base = OTHER; note = 2'-O-methylguanosine-3'-phosphate
  modified_base 17: mod_base = OTHER; note = 2'-O-methylcytidine-3'-phosphate
  modified_base 18: mod_base = OTHER; note = 2'-O-methyluridine-3'-phosphate
  modified_base 19: mod_base = OTHER; note = 2'-O-methylguanosine-3'-phosphorothioate
  modified_base 20: mod_base = OTHER; note = 2'-O-methylguanosine-3'-phosphorothioate
  modified_base 21: mod_base = OTHER; note = 2'-O-methyladenosine
cacggtgacaggagggctgga

SEQ ID NO: 333 - RNA, 21 nt, synthetic construct
  source 1..21: mol_type = other RNA
  modified_base 1: mod_base = OTHER; note = 2'-O-methylcytidine-3'-phosphorothioate
  modified_base 2: mod_base = OTHER; note = 2'-O-methylguanosine-3'-phosphorothioate
  modified_base 3: mod_base = OTHER; note = 2'-O-methylcytidine-3'-phosphate
  modified_base 4: mod_base = OTHER; note = 2'-O-methylguanosine-3'-phosphate
  modified_base 5: mod_base = OTHER; note = 2'-O-methylcytidine-3'-phosphate
  modified_base 6: mod_base = OTHER; note = 2'-O-hexadecyl-uridine-3'-phosphate
  modified_base 7: mod_base = OTHER; note = 2'-deoxy-2'-fluoroguanosine-3'-phosphate
  modified_base 8: mod_base = OTHER; note = 2'-O-methyladenosine-3'-phosphate
  modified_base 9: mod_base = OTHER; note = 2'-deoxy-2'-fluorouridine-3'-phosphate
  modified_base 10: mod_base = OTHER; note = 2'-deoxy-2'-fluoroguanosine-3'-phosphate
  modified_base 11: mod_base = OTHER; note = 2'-deoxy-2'-fluorouridine-3'-phosphate
  modified_base 12: mod_base = OTHER; note = 2'-O-methyladenosine-3'-phosphate
  modified_base 13: mod_base = OTHER; note = 2'-O-methylcytidine-3'-phosphate
  modified_base 14: mod_base = OTHER; note = 2'-O-methyladenosine-3'-phosphate
  modified_base 15: mod_base = OTHER; note = 2'-O-methylcytidine-3'-phosphate
  modified_base 16: mod_base = OTHER; note = 2'-O-methylguanosine-3'-phosphate
  modified_base 17: mod_base = OTHER; note = 2'-O-methylguanosine-3'-phosphate
  modified_base 18: mod_base = OTHER; note = 2'-O-methyladenosine-3'-phosphate
  modified_base 19: mod_base = OTHER; note = 2'-O-methylcytidine-3'-phosphorothioate
  modified_base 20: mod_base = OTHER; note = 2'-O-methyladenosine-3'-phosphorothioate
  modified_base 21: mod_base = OTHER; note = 2'-O-methyladenosine
cgcgctgatgtacacggacaa

SEQ ID NO: 334 - RNA, 21 nt, synthetic construct
  source 1..21: mol_type = other RNA
  modified_base 1: mod_base = OTHER; note = 2'-O-methyladenosine-3'-phosphorothioate
  modified_base 2: mod_base = OTHER; note = 2'-O-methylcytidine-3'-phosphorothioate
  modified_base 3: mod_base = OTHER; note = 2'-O-methylguanosine-3'-phosphate
  modified_base 4: mod_base = OTHER; note = 2'-O-methylguanosine-3'-phosphate
  modified_base 5: mod_base = OTHER; note = 2'-O-methyladenosine-3'-phosphate
  modified_base 6: mod_base = OTHER; note = 2'-O-hexadecyl-cytidine-3'-phosphate
  modified_base 7: mod_base = OTHER; note = 2'-deoxy-2'-fluoroadenosine-3'-phosphate
  modified_base 8: mod_base = OTHER; note = 2'-O-methylcytidine-3'-phosphate
  modified_base 9: mod_base = OTHER; note = 2'-deoxy-2'-fluoroguanosine-3'-phosphate
  modified_base 10: mod_base = OTHER; note = 2'-deoxy-2'-fluoroguanosine-3'-phosphate
  modified_base 11: mod_base = OTHER; note = 2'-deoxy-2'-fluorouridine-3'-phosphate
  modified_base 12: mod_base = OTHER; note = 2'-O-methyladenosine-3'-phosphate
  modified_base 13: mod_base = OTHER; note = 2'-O-methylcytidine-3'-phosphate
  modified_base 14: mod_base = OTHER; note = 2'-O-methyladenosine-3'-phosphate
  modified_base 15: mod_base = OTHER; note = 2'-O-methylguanosine-3'-phosphate
  modified_base 16: mod_base = OTHER; note = 2'-O-methyladenosine-3'-phosphate
  modified_base 17: mod_base = OTHER; note = 2'-O-methylcytidine-3'-phosphate
  modified_base 18: mod_base = OTHER; note = 2'-O-methylcytidine-3'-phosphate
  modified_base 19: mod_base = OTHER; note = 2'-O-methyluridine-3'-phosphorothioate
  modified_base 20: mod_base = OTHER; note = 2'-O-methyluridine-3'-phosphorothioate
  modified_base 21: mod_base = OTHER; note = 2'-O-methyladenosine
acggacacggtacagacctta

SEQ ID NO: 335 - RNA, 21 nt, synthetic construct
  source 1..21: mol_type = other RNA
  modified_base 1: mod_base = OTHER; note = 2'-O-methylguanosine-3'-phosphorothioate
  modified_base 2: mod_base = OTHER; note = 2'-O-methyluridine-3'-phosphorothioate
  modified_base 3: mod_base = OTHER; note = 2'-O-methyladenosine-3'-phosphate
  modified_base 4: mod_base = OTHER; note = 2'-O-methylcytidine-3'-phosphate
  modified_base 5: mod_base = OTHER; note = 2'-O-methyladenosine-3'-phosphate
  modified_base 6: mod_base = OTHER; note = 2'-O-hexadecyl-guanosine-3'-phosphate
  modified_base 7: mod_base = OTHER; note = 2'-deoxy-2'-fluoroadenosine-3'-phosphate
  modified_base 8: mod_base = OTHER; note = 2'-O-methylcytidine-3'-phosphate
  modified_base 9: mod_base = OTHER; note = 2'-deoxy-2'-fluorocytidine-3'-phosphate
  modified_base 10: mod_base = OTHER; note = 2'-deoxy-2'-fluorouridine-3'-phosphate
  modified_base 11: mod_base = OTHER; note = 2'-deoxy-2'-fluorouridine-3'-phosphate
  modified_base 12: mod_base = OTHER; note = 2'-O-methylcytidine-3'-phosphate
  modified_base 13: mod_base = OTHER; note = 2'-O-methylguanosine-3'-phosphate
  modified_base 14: mod_base = OTHER; note = 2'-O-methyluridine-3'-phosphate
  modified_base 15: mod_base = OTHER; note = 2'-O-methylcytidine-3'-phosphate
  modified_base 16: mod_base = OTHER; note = 2'-O-methyladenosine-3'-phosphate
  modified_base 17: mod_base = OTHER; note = 2'-O-methyluridine-3'-phosphate
  modified_base 18: mod_base = OTHER; note = 2'-O-methyluridine-3'-phosphate
  modified_base 19: mod_base = OTHER; note = 2'-O-methylcytidine-3'-phosphorothioate
  modified_base 20: mod_base = OTHER; note = 2'-O-methyluridine-3'-phosphorothioate
  modified_base 21: mod_base = OTHER; note = 2'-O-methyladenosine
gtacagaccttcgtcattcta

SEQ ID NO: 336 - RNA, 21 nt, synthetic construct
  source 1..21: mol_type = other RNA
  modified_base 1: mod_base = OTHER; note = 2'-O-methylguanosine-3'-phosphorothioate
  modified_base 2: mod_base = OTHER; note = 2'-O-methylcytidine-3'-phosphorothioate
  modified_base 3: mod_base = OTHER; note = 2'-O-methylcytidine-3'-phosphate
  modified_base 4: mod_base = OTHER; note = 2'-O-methyluridine-3'-phosphate
  modified_base 5: mod_base = OTHER; note = 2'-O-methylguanosine-3'-phosphate
  modified_base 6: mod_base = OTHER; note = 2'-O-hexadecyl-cytidine-3'-phosphate
  modified_base 7: mod_base = OTHER; note = 2'-deoxy-2'-fluoroadenosine-3'-phosphate
  modified_base 8: mod_base = OTHER; note = 2'-O-methyluridine-3'-phosphate
  modified_base 9: mod_base = OTHER; note = 2'-deoxy-2'-fluorocytidine-3'-phosphate
  modified_base 10: mod_base = OTHER; note = 2'-deoxy-2'-fluorocytidine-3'-phosphate
  modified_base 11: mod_base = OTHER; note = 2'-deoxy-2'-fluorouridine-3'-phosphate
  modified_base 12: mod_base = OTHER; note = 2'-O-methylcytidine-3'-phosphate
  modified_base 13: mod_base = OTHER; note = 2'-O-methyladenosine-3'-phosphate
  modified_base 14: mod_base = OTHER; note = 2'-O-methyluridine-3'-phosphate
  modified_base 15: mod_base = OTHER; note = 2'-O-methylguanosine-3'-phosphate
  modified_base 16: mod_base = OTHER; note = 2'-O-methylguanosine-3'-phosphate
  modified_base 17: mod_base = OTHER; note = 2'-O-methylguanosine-3'-phosphate
  modified_base 18: mod_base = OTHER; note = 2'-O-methyluridine-3'-phosphate
  modified_base 19: mod_base = OTHER; note = 2'-O-methyluridine-3'-phosphorothioate
  modified_base 20: mod_base = OTHER; note = 2'-O-methyladenosine-3'-phosphorothioate
  modified_base 21: mod_base = OTHER; note = 2'-O-methyladenosine
gcctgcatcctcatgggttaa

SEQ ID NO: 337 - RNA, 21 nt, synthetic construct
  source 1..21: mol_type = other RNA
  modified_base 1: mod_base = OTHER; note = 2'-O-methylcytidine-3'-phosphorothioate
  modified_base 2: mod_base = OTHER; note = 2'-O-methyluridine-3'-phosphorothioate
  modified_base 3: mod_base = OTHER; note = 2'-O-methylcytidine-3'-phosphate
  modified_base 4: mod_base = OTHER; note = 2'-O-methyladenosine-3'-phosphate
  modified_base 5: mod_base = OTHER; note = 2'-O-methyluridine-3'-phosphate
  modified_base 6: mod_base = OTHER; note = 2'-O-hexadecyl-guanosine-3'-phosphate
  modified_base 7: mod_base = OTHER; note = 2'-deoxy-2'-fluoroguanosine-3'-phosphate
  modified_base 8: mod_base = OTHER; note = 2'-O-methylguanosine-3'-phosphate
  modified_base 9: mod_base = OTHER; note = 2'-deoxy-2'-fluorouridine-3'-phosphate
  modified_base 10: mod_base = OTHER; note = 2'-deoxy-2'-fluorouridine-3'-phosphate
  modified_base 11: mod_base = OTHER; note = 2'-deoxy-2'-fluoroadenosine-3'-phosphate
  modified_base 12: mod_base = OTHER; note = 2'-O-methylcytidine-3'-phosphate
  modified_base 13: mod_base = OTHER; note = 2'-O-methylguanosine-3'-phosphate
  modified_base 14: mod_base = OTHER; note = 2'-O-methylcytidine-3'-phosphate
  modified_base 15: mod_base = OTHER; note = 2'-O-methylcytidine-3'-phosphate
  modified_base 16: mod_base = OTHER; note = 2'-O-methyluridine-3'-phosphate
  modified_base 17: mod_base = OTHER; note = 2'-O-methyluridine-3'-phosphate
  modified_base 18: mod_base = OTHER; note = 2'-O-methylcytidine-3'-phosphate
  modified_base 19: mod_base = OTHER; note = 2'-O-methylcytidine-3'-phosphorothioate
  modified_base 20: mod_base = OTHER; note = 2'-O-methyladenosine-3'-phosphorothioate
  modified_base 21: mod_base = OTHER; note = 2'-O-methyladenosine
ctcatgggttacgccttccaa

SEQ ID NO: 338 - RNA, 21 nt, synthetic construct
  source 1..21: mol_type = other RNA
  modified_base 1: mod_base = OTHER; note = 2'-O-methyluridine-3'-phosphorothioate
  modified_base 2: mod_base = OTHER; note = 2'-O-methyladenosine-3'-phosphorothioate
  modified_base 3: mod_base = OTHER; note = 2'-O-methylcytidine-3'-phosphate
  modified_base 4: mod_base = OTHER; note = 2'-O-methylguanosine-3'-phosphate
  modified_base 5: mod_base = OTHER; note = 2'-O-methylcytidine-3'-phosphate
  modified_base 6: mod_base = OTHER; note = 2'-O-hexadecyl-cytidine-3'-phosphate
  modified_base 7: mod_base = OTHER; note = 2'-deoxy-2'-fluorouridine-3'-phosphate
  modified_base 8: mod_base = OTHER; note = 2'-O-methyluridine-3'-phosphate
  modified_base 9: mod_base = OTHER; note = 2'-deoxy-2'-fluorocytidine-3'-phosphate
  modified_base 10: mod_base = OTHER; note = 2'-deoxy-2'-fluorocytidine-3'-phosphate
  modified_base 11: mod_base = OTHER; note = 2'-deoxy-2'-fluoroadenosine-3'-phosphate
  modified_base 12: mod_base = OTHER; note = 2'-O-methylcytidine-3'-phosphate
  modified_base 13: mod_base = OTHER; note = 2'-O-methylguanosine-3'-phosphate
  modified_base 14: mod_base = OTHER; note = 2'-O-methyladenosine-3'-phosphate
  modified_base 15: mod_base = OTHER; note = 2'-O-methylguanosine-3'-phosphate
  modified_base 16: mod_base = OTHER; note = 2'-O-methylguanosine-3'-phosphate
  modified_base 17: mod_base = OTHER; note = 2'-O-methyluridine-3'-phosphate
  modified_base 18: mod_base = OTHER; note = 2'-O-methylguanosine-3'-phosphate
  modified_base 19: mod_base = OTHER; note = 2'-O-methylguanosine-3'-phosphorothioate
  modified_base 20: mod_base = OTHER; note = 2'-O-methylguanosine-3'-phosphorothioate
  modified_base 21: mod_base = OTHER; note = 2'-O-methyladenosine
tacgccttccacgaggtggga

SEQ ID NO: 339 - RNA, 21 nt, synthetic construct
  source 1..21: mol_type = other RNA
  modified_base 1: mod_base = OTHER; note = 2'-O-methylcytidine-3'-phosphorothioate
  modified_base 2: mod_base = OTHER; note = 2'-O-methyladenosine-3'-phosphorothioate
  modified_base 3: mod_base = OTHER; note = 2'-O-methylcytidine-3'-phosphate
  modified_base 4: mod_base = OTHER; note = 2'-O-methylguanosine-3'-phosphate
  modified_base 5: mod_base = OTHER; note = 2'-O-methyladenosine-3'-phosphate
  modified_base 6: mod_base = OTHER; note = 2'-O-hexadecyl-guanosine-3'-phosphate
  modified_base 7: mod_base = OTHER; note = 2'-deoxy-2'-fluoroguanosine-3'-phosphate
  modified_base 8: mod_base = OTHER; note = 2'-O-methyluridine-3'-phosphate
  modified_base 9: mod_base = OTHER; note = 2'-deoxy-2'-fluoroguanosine-3'-phosphate
  modified_base 10: mod_base = OTHER; note = 2'-deoxy-2'-fluoroguanosine-3'-phosphate
  modified_base 11: mod_base = OTHER; note = 2'-deoxy-2'-fluoroguanosine-3'-phosphate
  modified_base 12: mod_base = OTHER; note = 2'-O-methylcytidine-3'-phosphate
  modified_base 13: mod_base = OTHER; note = 2'-O-methylguanosine-3'-phosphate
  modified_base 14: mod_base = OTHER; note = 2'-O-methylguanosine-3'-phosphate
  modified_base 15: mod_base = OTHER; note = 2'-O-methylguanosine-3'-phosphate
  modified_base 16: mod_base = OTHER; note = 2'-O-methyluridine-3'-phosphate
  modified_base 17: mod_base = OTHER; note = 2'-O-methyladenosine-3'-phosphate
  modified_base 18: mod_base = OTHER; note = 2'-O-methyluridine-3'-phosphate
  modified_base 19: mod_base = OTHER; note = 2'-O-methyluridine-3'-phosphorothioate
  modified_base 20: mod_base = OTHER; note = 2'-O-methylcytidine-3'-phosphorothioate
  modified_base 21: mod_base = OTHER; note = 2'-O-methyladenosine
cacgaggtgggcgggtattca

SEQ ID NO: 340 - RNA, 21 nt, synthetic construct
  source 1..21: mol_type = other RNA
  modified_base 1: mod_base = OTHER; note = 2'-O-methylcytidine-3'-phosphorothioate
  modified_base 2: mod_base = OTHER; note = 2'-O-methylguanosine-3'-phosphorothioate
  modified_base 3: mod_base = OTHER; note = 2'-O-methylguanosine-3'-phosphate
  modified_base 4: mod_base = OTHER; note = 2'-O-methylguanosine-3'-phosphate
  modified_base 5: mod_base = OTHER; note = 2'-O-methyluridine-3'-phosphate
  modified_base 6: mod_base = OTHER; note = 2'-O-hexadecyl-adenosine-3'-phosphate
  modified_base 7: mod_base = OTHER; note = 2'-deoxy-2'-fluorouridine-3'-phosphate
  modified_base 8: mod_base = OTHER; note = 2'-O-methyluridine-3'-phosphate
  modified_base 9: mod_base = OTHER; note = 2'-deoxy-2'-fluorocytidine-3'-phosphate
  modified_base 10: mod_base = OTHER; note = 2'-deoxy-2'-fluoroguanosine-3'-phosphate
  modified_base 11: mod_base = OTHER; note = 2'-deoxy-2'-fluoroguanosine-3'-phosphate
  modified_base 12: mod_base = OTHER; note = 2'-O-methylguanosine-3'-phosphate
  modified_base 13: mod_base = OTHER; note = 2'-O-methyluridine-3'-phosphate
  modified_base 14: mod_base = OTHER; note = 2'-O-methylcytidine-3'-phosphate
  modified_base 15: mod_base = OTHER; note = 2'-O-methyluridine-3'-phosphate
  modified_base 16: mod_base = OTHER; note = 2'-O-methylcytidine-3'-phosphate
  modified_base 17: mod_base = OTHER; note = 2'-O-methyluridine-3'-phosphate
  modified_base 18: mod_base = OTHER; note = 2'-O-methyluridine-3'-phosphate
  modified_base 19: mod_base = OTHER; note = 2'-O-methylcytidine-3'-phosphorothioate
  modified_base 20: mod_base = OTHER; note = 2'-O-methylguanosine-3'-phosphorothioate
  modified_base 21: mod_base = OTHER; note = 2'-O-methyladenosine
cgggtattcgggtctcttcga

SEQ ID NO: 341 - RNA, 21 nt, synthetic construct
  source 1..21: mol_type = other RNA
  modified_base 1: mod_base = OTHER; note = 2'-O-methylguanosine-3'-phosphorothioate
  modified_base 2: mod_base = OTHER; note = 2'-O-methylguanosine-3'-phosphorothioate
  modified_base 3: mod_base = OTHER; note = 2'-O-methyluridine-3'-phosphate
  modified_base 4: mod_base = OTHER; note = 2'-O-methylcytidine-3'-phosphate
  modified_base 5: mod_base = OTHER; note = 2'-O-methyluridine-3'-phosphate
  modified_base 6: mod_base = OTHER; note = 2'-O-hexadecyl-cytidine-3'-phosphate
  modified_base 7: mod_base = OTHER; note = 2'-deoxy-2'-fluorouridine-3'-phosphate
  modified_base 8: mod_base = OTHER; note = 2'-O-methyluridine-3'-phosphate
  modified_base 9: mod_base = OTHER; note = 2'-deoxy-2'-fluorocytidine-3'-phosphate
  modified_base 10: mod_base = OTHER; note = 2'-deoxy-2'-fluoroguanosine-3'-phosphate
  modified_base 11: mod_base = OTHER; note = 2'-deoxy-2'-fluoroadenosine-3'-phosphate
  modified_base 12: mod_base = OTHER; note = 2'-O-methylcytidine-3'-phosphate
  modified_base 13: mod_base = OTHER; note = 2'-O-methyladenosine-3'-phosphate
  modified_base 14: mod_base = OTHER; note = 2'-O-methyladenosine-3'-phosphate
  modified_base 15: mod_base = OTHER; note = 2'-O-methyladenosine-3'-phosphate
  modified_base 16: mod_base = OTHER; note = 2'-O-methyluridine-3'-phosphate
  modified_base 17: mod_base = OTHER; note = 2'-O-methyladenosine-3'-phosphate
  modified_base 18: mod_base = OTHER; note = 2'-O-methylcytidine-3'-phosphate
  modified_base 19: mod_base = OTHER; note = 2'-O-methylcytidine-3'-phosphorothioate
  modified_base 20: mod_base = OTHER; note = 2'-O-methyluridine-3'-phosphorothioate
  modified_base 21: mod_base = OTHER; note = 2'-O-methyladenosine
ggtctcttcgacaaataccta

SEQ ID NO: 342 - RNA, 21 nt, synthetic construct
  source 1..21: mol_type = other RNA
  modified_base 1: mod_base = OTHER; note = 2'-O-methylcytidine-3'-phosphorothioate
  modified_base 2: mod_base = OTHER; note = 2'-O-methylcytidine-3'-phosphorothioate
  modified_base 3: mod_base = OTHER; note = 2'-O-methyluridine-3'-phosphate
  modified_base 4: mod_base = OTHER; note = 2'-O-methylguanosine-3'-phosphate
  modified_base 5: mod_base = OTHER; note = 2'-O-methylguanosine-3'-phosphate
  modified_base 6: mod_base = OTHER; note = 2'-O-hexadecyl-guanosine-3'-phosphate
  modified_base 7: mod_base = OTHER; note = 2'-deoxy-2'-fluoroadenosine-3'-phosphate
  modified_base 8: mod_base = OTHER; note = 2'-O-methylguanosine-3'-phosphate
  modified_base 9: mod_base = OTHER; note = 2'-deoxy-2'-fluorocytidine-3'-phosphate
  modified_base 10: mod_base = OTHER; note = 2'-deoxy-2'-fluoroadenosine-3'-phosphate
  modified_base 11: mod_base = OTHER; note = 2'-deoxy-2'-fluoroguanosine-3'-phosphate
  modified_base 12: mod_base = OTHER; note = 2'-O-methylcytidine-3'-phosphate
  modified_base 13: mod_base = OTHER; note = 2'-O-methylguanosine-3'-phosphate
  modified_base 14: mod_base = OTHER; note = 2'-O-methyladenosine-3'-phosphate
  modified_base 15: mod_base = OTHER; note = 2'-O-methylcytidine-3'-phosphate
  modified_base 16: mod_base = OTHER; note = 2'-O-methyluridine-3'-phosphate
  modified_base 17: mod_base = OTHER; note = 2'-O-methyluridine-3'-phosphate
  modified_base 18: mod_base = OTHER; note = 2'-O-methylcytidine-3'-phosphate
  modified_base 19: mod_base = OTHER; note = 2'-O-methylguanosine-3'-phosphorothioate
  modified_base 20: mod_base = OTHER; note = 2'-O-methylcytidine-3'-phosphorothioate
  modified_base 21: mod_base = OTHER; note = 2'-O-methyladenosine
cctgggagcagcgacttcgca

SEQ ID NO: 343 - RNA, 21 nt, synthetic construct
  source 1..21: mol_type = other RNA
  modified_base 1: mod_base = OTHER; note = 2'-O-methyladenosine-3'-phosphorothioate
  modified_base 2: mod_base = OTHER; note = 2'-O-methylguanosine-3'-phosphorothioate
  modified_base 3: mod_base = OTHER; note = 2'-O-methylcytidine-3'-phosphate
  modified_base 4: mod_base = OTHER; note = 2'-O-methylguanosine-3'-phosphate
  modified_base 5: mod_base = OTHER; note = 2'-O-methyladenosine-3'-phosphate
  modified_base 6: mod_base = OTHER; note = 2'-O-hexadecyl-cytidine-3'-phosphate
  modified_base 7: mod_base = OTHER; note = 2'-deoxy-2'-fluorouridine-3'-phosphate
  modified_base 8: mod_base = OTHER; note = 2'-O-methyluridine-3'-phosphate
  modified_base 9: mod_base = OTHER; note = 2'-deoxy-2'-fluorocytidine-3'-phosphate
  modified_base 10: mod_base = OTHER; note = 2'-deoxy-2'-fluoroguanosine-3'-phosphate
  modified_base 11: mod_base = OTHER; note = 2'-deoxy-2'-fluorocytidine-3'-phosphate
  modified_base 12: mod_base = OTHER; note = 2'-O-methyluridine-3'-phosphate
  modified_base 13: mod_base = OTHER; note = 2'-O-methylguanosine-3'-phosphate
  modified_base 14: mod_base = OTHER; note = 2'-O-methyladenosine-3'-phosphate
  modified_base 15: mod_base = OTHER; note = 2'-O-methylcytidine-3'-phosphate
  modified_base 16: mod_base = OTHER; note = 2'-O-methylguanosine-3'-phosphate
  modified_base 17: mod_base = OTHER; note = 2'-O-methylguanosine-3'-phosphate
  modified_base 18: mod_base = OTHER; note = 2'-O-methyluridine-3'-phosphate
  modified_base 19: mod_base = OTHER; note = 2'-O-methylguanosine-3'-phosphorothioate
  modified_base 20: mod_base = OTHER; note = 2'-O-methyluridine-3'-phosphorothioate
  modified_base 21: mod_base = OTHER; note = 2'-O-methyladenosine
agcgacttcgctgacggtgta

SEQ ID NO: 344 - RNA, 21 nt, synthetic construct
  source 1..21: mol_type = other RNA
  modified_base 1: mod_base = OTHER; note = 2'-O-methyluridine-3'-phosphorothioate
  modified_base 2: mod_base = OTHER; note = 2'-O-methylguanosine-3'-phosphorothioate
  modified_base 3: mod_base = OTHER; note = 2'-O-methyladenosine-3'-phosphate
  modified_base 4: mod_base = OTHER; note = 2'-O-methylcytidine-3'-phosphate
  modified_base 5: mod_base = OTHER; note = 2'-O-methylguanosine-3'-phosphate
  modified_base 6: mod_base = OTHER; note = 2'-O-hexadecyl-guanosine-3'-phosphate
  modified_base 7: mod_base = OTHER; note = 2'-deoxy-2'-fluorouridine-3'-phosphate
  modified_base 8: mod_base = OTHER; note = 2'-O-methylguanosine-3'-phosphate
  modified_base 9: mod_base = OTHER; note = 2'-deoxy-2'-fluorouridine-3'-phosphate
  modified_base 10: mod_base = OTHER; note = 2'-deoxy-2'-fluorocytidine-3'-phosphate
  modified_base 11: mod_base = OTHER; note = 2'-deoxy-2'-fluorocytidine-3'-phosphate
  modified_base 12: mod_base = OTHER; note = 2'-O-methylguanosine-3'-phosphate
  modified_base 13: mod_base = OTHER; note = 2'-O-methyladenosine-3'-phosphate
  modified_base 14: mod_base = OTHER; note = 2'-O-methylguanosine-3'-phosphate
  modified_base 15: mod_base = OTHER; note = 2'-O-methylguanosine-3'-phosphate
  modified_base 16: mod_base = OTHER; note = 2'-O-methyladenosine-3'-phosphate
  modified_base 17: mod_base = OTHER; note = 2'-O-methyluridine-3'-phosphate
  modified_base 18: mod_base = OTHER; note = 2'-O-methylcytidine-3'-phosphate
  modified_base 19: mod_base = OTHER; note = 2'-O-methylcytidine-3'-phosphorothioate
  modified_base 20: mod_base = OTHER; note = 2'-O-methyladenosine-3'-phosphorothioate
  modified_base 21: mod_base = OTHER; note = 2'-O-methyladenosine
tgacggtgtccgaggatccaa

SEQ ID NO: 345 - RNA, 21 nt, synthetic construct
  source 1..21: mol_type = other RNA
  modified_base 1: mod_base = OTHER; note = 2'-O-methyluridine-3'-phosphorothioate
  modified_base 2: mod_base = OTHER; note = 2'-O-methylcytidine-3'-phosphorothioate
  modified_base 3: mod_base = OTHER; note = 2'-O-methylcytidine-3'-phosphate
  modified_base 4: mod_base = OTHER; note = 2'-O-methyladenosine-3'-phosphate
  modified_base 5: mod_base = OTHER; note = 2'-O-methylguanosine-3'-phosphate
  modified_base 6: mod_base = OTHER; note = 2'-O-hexadecyl-cytidine-3'-phosphate
  modified_base 7: mod_base = OTHER; note = 2'-deoxy-2'-fluorocytidine-3'-phosphate
  modified_base 8: mod_base = OTHER; note = 2'-O-methylguanosine-3'-phosphate
  modified_base 9: mod_base = OTHER; note = 2'-deoxy-2'-fluorouridine-3'-phosphate
  modified_base 10: mod_base = OTHER; note = 2'-deoxy-2'-fluoroguanosine-3'-phosphate
  modified_base 11: mod_base = OTHER; note = 2'-deoxy-2'-fluoroguanosine-3'-phosphate
  modified_base 12: mod_base = OTHER; note = 2'-O-methylguanosine-3'-phosphate
  modified_base 13: mod_base = OTHER; note = 2'-O-methyladenosine-3'-phosphate
  modified_base 14: mod_base = OTHER; note = 2'-O-methyladenosine-3'-phosphate
  modified_base 15: mod_base = OTHER; note = 2'-O-methyladenosine-3'-phosphate
  modified_base 16: mod_base = OTHER; note = 2'-O-methylcytidine-3'-phosphate
  modified_base 17: mod_base = OTHER; note = 2'-O-methyladenosine-3'-phosphate
  modified_base 18: mod_base = OTHER; note = 2'-O-methyluridine-3'-phosphate
  modified_base 19: mod_base = OTHER; note = 2'-O-methylcytidine-3'-phosphorothioate
  modified_base 20: mod_base = OTHER; note = 2'-O-methyluridine-3'-phosphorothioate
  modified_base 21: mod_base = OTHER; note = 2'-O-methyladenosine
tccagccgtgggaaacatcta

SEQ ID NO: 346 - RNA, 21 nt, synthetic construct
  source 1..21: mol_type = other RNA
  modified_base 1: mod_base = OTHER; note = 2'-O-methylguanosine-3'-phosphorothioate
  modified_base 2: mod_base = OTHER; note = 2'-O-methylguanosine-3'-phosphorothioate
  modified_base 3: mod_base = OTHER; note = 2'-O-methylguanosine-3'-phosphate
  modified_base 4: mod_base = OTHER; note = 2'-O-methyladenosine-3'-phosphate
  modified_base 5: mod_base = OTHER; note = 2'-O-methyladenosine-3'-phosphate
  modified_base 6: mod_base = OTHER; note = 2'-O-hexadecyl-adenosine-3'-phosphate
  modified_base 7: mod_base = OTHER; note = 2'-deoxy-2'-fluorocytidine-3'-phosphate
  modified_base 8: mod_base = OTHER; note = 2'-O-methyladenosine-3'-phosphate
  modified_base 9: mod_base = OTHER; note = 2'-deoxy-2'-fluorouridine-3'-phosphate
  modified_base 10: mod_base = OTHER; note = 2'-deoxy-2'-fluorocytidine-3'-phosphate
  modified_base 11: mod_base = OTHER; note = 2'-deoxy-2'-fluorouridine-3'-phosphate
  modified_base 12: mod_base = OTHER; note = 2'-O-methylcytidine-3'-phosphate
  modified_base 13: mod_base = OTHER; note = 2'-O-methylcytidine-3'-phosphate
  modified_base 14: mod_base = OTHER; note = 2'-O-methyladenosine-3'-phosphate
  modified_base 15: mod_base = OTHER; note = 2'-O-methylguanosine-3'-phosphate
  modified_base 16: mod_base = OTHER; note = 2'-O-methylcytidine-3'-phosphate
  modified_base 17: mod_base = OTHER; note = 2'-O-methyluridine-3'-phosphate
  modified_base 18: mod_base = OTHER; note = 2'-O-methyluridine-3'-phosphate
  modified_base 19: mod_base = OTHER; note = 2'-O-methylcytidine-3'-phosphorothioate
  modified_base 20: mod_base = OTHER; note = 2'-O-methyluridine-3'-phosphorothioate
  modified_base 21: mod_base = OTHER; note = 2'-O-methyladenosine
gggaaacatctccagcttcta

SEQ ID NO: 347 - RNA, 21 nt, synthetic construct
  source 1..21: mol_type = other RNA
  modified_base 1: mod_base = OTHER; note = 2'-O-methylcytidine-3'-phosphorothioate
  modified_base 2: mod_base = OTHER; note = 2'-O-methyluridine-3'-phosphorothioate
  modified_base 3: mod_base = OTHER; note = 2'-O-methylcytidine-3'-phosphate
  modified_base 4: mod_base = OTHER; note = 2'-O-methylcytidine-3'-phosphate
  modified_base 5: mod_base = OTHER; note = 2'-O-methyladenosine-3'-phosphate
  modified_base 6: mod_base = OTHER; note = 2'-O-hexadecyl-guanosine-3'-phosphate
  modified_base 7: mod_base = OTHER; note = 2'-deoxy-2'-fluorocytidine-3'-phosphate
  modified_base 8: mod_base = OTHER; note = 2'-O-methyluridine-3'-phosphate
  modified_base 9: mod_base = OTHER; note = 2'-deoxy-2'-fluorouridine-3'-phosphate
  modified_base 10: mod_base = OTHER; note = 2'-deoxy-2'-fluorocytidine-3'-phosphate
  modified_base 11: mod_base = OTHER; note = 2'-deoxy-2'-fluorouridine-3'-phosphate
  modified_base 12: mod_base = OTHER; note = 2'-O-methylguanosine-3'-phosphate
  modified_base 13: mod_base = OTHER; note = 2'-O-methylcytidine-3'-phosphate
  modified_base 14: mod_base = OTHER; note = 2'-O-methyluridine-3'-phosphate
  modified_base 15: mod_base = OTHER; note = 2'-O-methyladenosine-3'-phosphate
  modified_base 16: mod_base = OTHER; note = 2'-O-methyluridine-3'-phosphate
  modified_base 17: mod_base = OTHER; note = 2'-O-methylcytidine-3'-phosphate
  modified_base 18: mod_base = OTHER; note = 2'-O-methylguanosine-3'-phosphate
  modified_base 19: mod_base = OTHER; note = 2'-O-methyladenosine-3'-phosphorothioate
  modified_base 20: mod_base = OTHER; note = 2'-O-methylcytidine-3'-phosphorothioate
  modified_base 21: mod_base = OTHER; note = 2'-O-methyladenosine
ctccagcttctgctatcgaca

SEQ ID NO: 348 - RNA, 21 nt, synthetic construct
  source 1..21: mol_type = other RNA
  modified_base 1: mod_base = OTHER; note = 2'-O-methyluridine-3'-phosphorothioate
  modified_base 2: mod_base = OTHER; note = 2'-O-methylcytidine-3'-phosphorothioate
  modified_base 3: mod_base = OTHER; note = 2'-O-methylcytidine-3'-phosphate
  modified_base 4: mod_base = OTHER; note = 2'-O-methyluridine-3'-phosphate
  modified_base 5: mod_base = OTHER; note = 2'-O-methyladenosine-3'-phosphate
  modified_base 6: mod_base = OTHER; note = 2'-O-hexadecyl-cytidine-3'-phosphate
  modified_base 7: mod_base = OTHER; note = 2'-deoxy-2'-fluorocytidine-3'-phosphate
  modified_base 8: mod_base = OTHER; note = 2'-O-methyladenosine-3'-phosphate
  modified_base 9: mod_base = OTHER; note = 2'-deoxy-2'-fluorocytidine-3'-phosphate
  modified_base 10: mod_base = OTHER; note = 2'-deoxy-2'-fluorocytidine-3'-phosphate
  modified_base 11: mod_base = OTHER; note = 2'-deoxy-2'-fluorouridine-3'-phosphate
  modified_base 12: mod_base = OTHER; note = 2'-O-methylguanosine-3'-phosphate
  modified_base 13: mod_base = OTHER; note = 2'-O-methylcytidine-3'-phosphate
  modified_base 14: mod_base = OTHER; note = 2'-O-methyluridine-3'-phosphate
  modified_base 15: mod_base = OTHER; note = 2'-O-methylcytidine-3'-phosphate
  modified_base 16: mod_base = OTHER; note = 2'-O-methylcytidine-3'-phosphate
  modified_base 17: mod_base = OTHER; note = 2'-O-methylguanosine-3'-phosphate
  modified_base 18: mod_base = OTHER; note = 2'-O-methylguanosine-3'-phosphate
  modified_base 19: mod_base = OTHER; note = 2'-O-methylcytidine-3'-phosphorothioate
  modified_base 20: mod_base = OTHER; note = 2'-O-methyladenosine-3'-phosphorothioate
  modified_base 21: mod_base = OTHER; note = 2'-O-methyladenosine
tcctaccacctgctccggcaa

SEQ ID NO: 349 - RNA, 21 nt, synthetic construct
  source 1..21: mol_type = other RNA
  modified_base 1: mod_base = OTHER; note = 2'-O-methyluridine-3'-phosphorothioate
  modified_base 2: mod_base = OTHER; note = 2'-O-methylcytidine-3'-phosphorothioate
  modified_base 3: mod_base = OTHER; note = 2'-O-methylguanosine-3'-phosphate
  modified_base 4: mod_base = OTHER; note = 2'-O-methylguanosine-3'-phosphate
  modified_base 5: mod_base = OTHER; note = 2'-O-methyladenosine-3'-phosphate
  modified_base 6: mod_base = OTHER; note = 2'-O-hexadecyl-cytidine-3'-phosphate
  modified_base 7: mod_base = OTHER; note = 2'-deoxy-2'-fluorouridine-3'-phosphate
  modified_base 8: mod_base = OTHER; note = 2'-O-methylcytidine-3'-phosphate
  modified_base 9: mod_base = OTHER; note = 2'-deoxy-2'-fluoroadenosine-3'-phosphate
  modified_base 10: mod_base = OTHER; note = 2'-deoxy-2'-fluorocytidine-3'-phosphate
  modified_base 11: mod_base = OTHER; note = 2'-deoxy-2'-fluoroadenosine-3'-phosphate
  modified_base 12: mod_base = OTHER; note = 2'-O-methyladenosine-3'-phosphate
  modified_base 13: mod_base = OTHER; note = 2'-O-methyluridine-3'-phosphate
  modified_base 14: mod_base = OTHER; note = 2'-O-methylcytidine-3'-phosphate
  modified_base 15: mod_base = OTHER; note = 2'-O-methylguanosine-3'-phosphate
  modified_base 16: mod_base = OTHER; note = 2'-O-methyluridine-3'-phosphate
  modified_base 17: mod_base = OTHER; note = 2'-O-methylcytidine-3'-phosphate
  modified_base 18: mod_base = OTHER; note = 2'-O-methyluridine-3'-phosphate
  modified_base 19: mod_base = OTHER; note = 2'-O-methylcytidine-3'-phosphorothioate
  modified_base 20: mod_base = OTHER; note = 2'-O-methylguanosine-3'-phosphorothioate
  modified_base 21: mod_base = OTHER; note = 2'-O-methyladenosine
tcggactcacaatcgtctcga

SEQ ID NO: 350 - RNA, 21 nt, synthetic construct
  source 1..21: mol_type = other RNA
  modified_base 1: mod_base = OTHER; note = 2'-O-methylcytidine-3'-phosphorothioate
  modified_base 2: mod_base = OTHER; note = 2'-O-methyluridine-3'-phosphorothioate
  modified_base 3: mod_base = OTHER; note = 2'-O-methylcytidine-3'-phosphate
  modified_base 4: mod_base = OTHER; note = 2'-O-methylguanosine-3'-phosphate
  modified_base 5: mod_base = OTHER; note = 2'-O-methylguanosine-3'-phosphate
  modified_base 6: mod_base = OTHER; note = 2'-O-hexadecyl-guanosine-3'-phosphate
  modified_base 7: mod_base = OTHER; note = 2'-deoxy-2'-fluorocytidine-3'-phosphate
  modified_base 8: mod_base = OTHER; note = 2'-O-methyluridine-3'-phosphate
  modified_base 9: mod_base = OTHER; note = 2'-deoxy-2'-fluoroguanosine-3'-phosphate
  modified_base 10: mod_base = OTHER; note = 2'-deoxy-2'-fluoroguanosine-3'-phosphate
  modified_base 11: mod_base = OTHER; note = 2'-deoxy-2'-fluorouridine-3'-phosphate
  modified_base 12: mod_base = OTHER; note = 2'-O-methyladenosine-3'-phosphate
  modified_base 13: mod_base = OTHER; note = 2'-O-methylcytidine-3'-phosphate
  modified_base 14: mod_base = OTHER; note = 2'-O-methyluridine-3'-phosphate
  modified_base 15: mod_base = OTHER; note = 2'-O-methylguanosine-3'-phosphate
  modified_base 16: mod_base = OTHER; note = 2'-O-methylguanosine-3'-phosphate
  modified_base 17: mod_base = OTHER; note = 2'-O-methyluridine-3'-phosphate
  modified_base 18: mod_base = OTHER; note = 2'-O-methylguanosine-3'-phosphate
  modified_base 19: mod_base = OTHER; note = 2'-O-methylcytidine-3'-phosphorothioate
  modified_base 20: mod_base = OTHER; note = 2'-O-methyladenosine-3'-phosphorothioate
  modified_base 21: mod_base = OTHER; note = 2'-O-methyladenosine
ctcgggctggtactggtgcaa

SEQ ID NO: 351 - RNA, 21 nt, synthetic construct
  source 1..21: mol_type = other RNA
  modified_base 1: mod_base = OTHER; note = 2'-O-methylguanosine-3'-phosphorothioate
  modified_base 2: mod_base = OTHER; note = 2'-O-methyluridine-3'-phosphorothioate
  modified_base 3: mod_base = OTHER; note = 2'-O-methylguanosine-3'-phosphate
  modified_base 4: mod_base = OTHER; note = 2'-O-methylcytidine-3'-phosphate
  modified_base 5: mod_base = OTHER; note = 2'-O-methyladenosine-3'-phosphate
  modified_base 6: mod_base = OTHER; note = 2'-O-hexadecyl-guanosine-3'-phosphate
  modified_base 7: mod_base = OTHER; note = 2'-deoxy-2'-fluorocytidine-3'-phosphate
  modified_base 8: mod_base = OTHER; note = 2'-O-methylguanosine-3'-phosphate
  modified_base 9: mod_base = OTHER; note = 2'-deoxy-2'-fluoroadenosine-3'-phosphate
  modified_base 10: mod_base = OTHER; note = 2'-deoxy-2'-fluorocytidine-3'-phosphate
  modified_base 11: mod_base = OTHER; note = 2'-deoxy-2'-fluorocytidine-3'-phosphate
  modified_base 12: mod_base = OTHER; note = 2'-O-methyladenosine-3'-phosphate
  modified_base 13: mod_base = OTHER; note = 2'-O-methylguanosine-3'-phosphate
  modified_base 14: mod_base = OTHER; note = 2'-O-methylguanosine-3'-phosphate
  modified_base 15: mod_base = OTHER; note = 2'-O-methyluridine-3'-phosphate
  modified_base 16: mod_base = OTHER; note = 2'-O-methylcytidine-3'-phosphate
  modified_base 17: mod_base = OTHER; note = 2'-O-methyladenosine-3'-phosphate
  modified_base 18: mod_base = OTHER; note = 2'-O-methyluridine-3'-phosphate
  modified_base 19: mod_base = OTHER; note = 2'-O-methylcytidine-3'-phosphorothioate
  modified_base 20: mod_base = OTHER; note = 2'-O-methylguanosine-3'-phosphorothioate
  modified_base 21: mod_base = OTHER; note = 2'-O-methyladenosine
gtgcagcgaccaggtcatcga

SEQ ID NO: 352 - RNA, 21 nt, synthetic construct
  source 1..21: mol_type = other RNA
  modified_base 1: mod_base = OTHER; note = 2'-O-methylcytidine-3'-phosphorothioate
  modified_base 2: mod_base = OTHER; note = 2'-O-methylcytidine-3'-phosphorothioate
  modified_base 3: mod_base = OTHER; note = 2'-O-methyladenosine-3'-phosphate
  modified_base 4: mod_base = OTHER; note = 2'-O-methylguanosine-3'-phosphate
  modified_base 5: mod_base = OTHER; note = 2'-O-methylguanosine-3'-phosphate
  modified_base 6: mod_base = OTHER; note = 2'-O-hexadecyl-uridine-3'-phosphate
  modified_base 7: mod_base = OTHER; note = 2'-deoxy-2'-fluorocytidine-3'-phosphate
  modified_base 8: mod_base = OTHER; note = 2'-O-methyladenosine-3'-phosphate
  modified_base 9: mod_base = OTHER; note = 2'-deoxy-2'-fluorouridine-3'-phosphate
  modified_base 10: mod_base = OTHER; note = 2'-deoxy-2'-fluorocytidine-3'-phosphate
  modified_base 11: mod_base = OTHER; note = 2'-deoxy-2'-fluoroguanosine-3'-phosphate
  modified_base 12: mod_base = OTHER; note = 2'-O-methyluridine-3'-phosphate
  modified_base 13: mod_base = OTHER; note = 2'-O-methylguanosine-3'-phosphate
  modified_base 14: mod_base = OTHER; note = 2'-O-methylcytidine-3'-phosphate
  modified_base 15: mod_base = OTHER; note = 2'-O-methyladenosine-3'-phosphate
  modified_base 16: mod_base = OTHER; note = 2'-O-methylguanosine-3'-phosphate
  modified_base 17: mod_base = OTHER; note = 2'-O-methylcytidine-3'-phosphate
  modified_base 18: mod_base = OTHER; note = 2'-O-methylguanosine-3'-phosphate
  modified_base 19: mod_base = OTHER; note = 2'-O-methylcytidine-3'-phosphorothioate
  modified_base 20: mod_base = OTHER; note = 2'-O-methyluridine-3'-phosphorothioate
  modified_base 21: mod_base = OTHER; note = 2'-O-methyladenosine
ccaggtcatcgtgcagcgcta

SEQ ID NO: 353 - RNA, 21 nt, synthetic construct
  source 1..21: mol_type = other RNA
  modified_base 1: mod_base = OTHER; note = 2'-O-methylguanosine-3'-phosphorothioate
  modified_base 2: mod_base = OTHER; note = 2'-O-methylguanosine-3'-phosphorothioate
  modified_base 3: mod_base = OTHER; note = 2'-O-methylguanosine-3'-phosphate
  modified_base 4: mod_base = OTHER; note = 2'-O-methyladenosine-3'-phosphate
  modified_base 5: mod_base = OTHER; note = 2'-O-methyladenosine-3'-phosphate
  modified_base 6: mod_base = OTHER; note = 2'-O-hexadecyl-guanosine-3'-phosphate
  modified_base 7: mod_base = OTHER; note = 2'-deoxy-2'-fluoroadenosine-3'-phosphate
  modified_base 8: mod_base = OTHER; note = 2'-O-methylguanosine-3'-phosphate
  modified_base 9: mod_base = OTHER; note = 2'-deoxy-2'-fluorocytidine-3'-phosphate
  modified_base 10: mod_base = OTHER; note = 2'-deoxy-2'-fluorocytidine-3'-phosphate
  modified_base 11: mod_base = OTHER; note = 2'-deoxy-2'-fluorouridine-3'-phosphate
  modified_base 12: mod_base = OTHER; note = 2'-O-methylguanosine-3'-phosphate
  modified_base 13: mod_base = OTHER; note = 2'-O-methyladenosine-3'-phosphate
  modified_base 14: mod_base = OTHER; note = 2'-O-methylcytidine-3'-phosphate
  modified_base 15: mod_base = OTHER; note = 2'-O-methylcytidine-3'-phosphate
  modified_base 16: mod_base = OTHER; note = 2'-O-methylcytidine-3'-phosphate
  modified_base 17: mod_base = OTHER; note = 2'-O-methyladenosine-3'-phosphate
  modified_base 18: mod_base = OTHER; note = 2'-O-methylcytidine-3'-phosphate
  modified_base 19: mod_base = OTHER; note = 2'-O-methyladenosine-3'-phosphorothioate
  modified_base 20: mod_base = OTHER; note = 2'-O-methyluridine-3'-phosphorothioate
  modified_base 21: mod_base = OTHER; note = 2'-O-methyladenosine
gggaagagcctgacccacata

SEQ ID NO: 354 - RNA, 21 nt, synthetic construct
  source 1..21: mol_type = other RNA
  modified_base 1: mod_base = OTHER; note = 2'-O-methylguanosine-3'-phosphorothioate
  modified_base 2: mod_base = OTHER; note = 2'-O-methyladenosine-3'-phosphorothioate
  modified_base 3: mod_base = OTHER; note = 2'-O-methylcytidine-3'-phosphate
  modified_base 4: mod_base = OTHER; note = 2'-O-methylcytidine-3'-phosphate
  modified_base 5: mod_base = OTHER; note = 2'-O-methylcytidine-3'-phosphate
  modified_base 6: mod_base = OTHER; note = 2'-O-hexadecyl-adenosine-3'-phosphate
  modified_base 7: mod_base = OTHER; note = 2'-deoxy-2'-fluorocytidine-3'-phosphate
  modified_base 8: mod_base = OTHER; note = 2'-O-methyladenosine-3'-phosphate
  modified_base 9: mod_base = OTHER; note = 2'-deoxy-2'-fluorouridine-3'-phosphate
  modified_base 10: mod_base = OTHER; note = 2'-deoxy-2'-fluorocytidine-3'-phosphate
  modified_base 11: mod_base = OTHER; note = 2'-deoxy-2'-fluoroadenosine-3'-phosphate
  modified_base 12: mod_base = OTHER; note = 2'-O-methyladenosine-3'-phosphate
  modified_base 13: mod_base = OTHER; note = 2'-O-methylguanosine-3'-phosphate
  modified_base 14: mod_base = OTHER; note = 2'-O-methylguanosine-3'-phosphate
  modified_base 15: mod_base = OTHER; note = 2'-O-methylcytidine-3'-phosphate
  modified_base 16: mod_base = OTHER; note = 2'-O-methylguanosine-3'-phosphate
  modified_base 17: mod_base = OTHER; note = 2'-O-methylguanosine-3'-phosphate
  modified_base 18: mod_base = OTHER; note = 2'-O-methylguanosine-3'-phosphate
  modified_base 19: mod_base = OTHER; note = 2'-O-methylcytidine-3'-phosphorothioate
  modified_base 20: mod_base = OTHER; note = 2'-O-methyluridine-3'-phosphorothioate
  modified_base 21: mod_base = OTHER; note = 2'-O-methyladenosine
gacccacatcaaggcgggcta

SEQ ID NO: 355 - RNA, 21 nt, synthetic construct
  source 1..21: mol_type = other RNA
  modified_base 1: mod_base = OTHER; note = 2'-O-methylguanosine-3'-phosphorothioate
  modified_base 2: mod_base = OTHER; note = 2'-O-methylcytidine-3'-phosphorothioate
  modified_base 3: mod_base = OTHER; note = 2'-O-methyluridine-3'-phosphate
  modified_base 4: mod_base = OTHER; note = 2'-O-methylguanosine-3'-phosphate
  modified_base 5: mod_base = OTHER; note = 2'-O-methylcytidine-3'-phosphate
  modified_base 6: mod_base = OTHER; note = 2'-O-hexadecyl-adenosine-3'-phosphate
  modified_base 7: mod_base = OTHER; note = 2'-deoxy-2'-fluorouridine-3'-phosphate
  modified_base 8: mod_base = OTHER; note = 2'-O-methylcytidine-3'-phosphate
  modified_base 9: mod_base = OTHER; note = 2'-deoxy-2'-fluorocytidine-3'-phosphate
  modified_base 10: mod_base = OTHER; note = 2'-deoxy-2'-fluorouridine-3'-phosphate
  modified_base 11: mod_base = OTHER; note = 2'-deoxy-2'-fluoroguanosine-3'-phosphate
  modified_base 12: mod_base = OTHER; note = 2'-O-methyluridine-3'-phosphate
  modified_base 13: mod_base = OTHER; note = 2'-O-methylguanosine-3'-phosphate
  modified_base 14: mod_base = OTHER; note = 2'-O-methyluridine-3'-phosphate
  modified_base 15: mod_base = OTHER; note = 2'-O-methylguanosine-3'-phosphate
  modified_base 16: mod_base = OTHER; note = 2'-O-methylguanosine-3'-phosphate
  modified_base 17: mod_base = OTHER; note = 2'-O-methylguanosine-3'-phosphate
  modified_base 18: mod_base = OTHER; note = 2'-O-methyluridine-3'-phosphate
  modified_base 19: mod_base = OTHER; note = 2'-O-methyladenosine-3'-phosphorothioate
  modified_base 20: mod_base = OTHER; note = 2'-O-methylcytidine-3'-phosphorothioate
  modified_base 21: mod_base = OTHER; note = 2'-O-methyladenosine
gctgcatcctgtgtgggtaca

SEQ ID NO: 356 - RNA, 21 nt, synthetic construct
  source 1..21: mol_type = other RNA
  modified_base 1: mod_base = OTHER; note = 2'-O-methyluridine-3'-phosphorothioate
  modified_base 2: mod_base = OTHER; note = 2'-O-methyladenosine-3'-phosphorothioate
  modified_base 3: mod_base = OTHER; note = 2'-O-methylcytidine-3'-phosphate
  modified_base 4: mod_base = OTHER; note = 2'-O-methylcytidine-3'-phosphate
  modified_base 5: mod_base = OTHER; note = 2'-O-methyluridine-3'-phosphate
  modified_base 6: mod_base = OTHER; note = 2'-O-hexadecyl-guanosine-3'-phosphate
  modified_base 7: mod_base = OTHER; note = 2'-deoxy-2'-fluoroadenosine-3'-phosphate
  modified_base 8: mod_base = OTHER; note = 2'-O-methyladenosine-3'-phosphate
  modified_base 9: mod_base = OTHER; note = 2'-deoxy-2'-fluoroguanosine-3'-phosphate
  modified_base 10: mod_base = OTHER; note = 2'-deoxy-2'-fluorocytidine-3'-phosphate
  modified_base 11: mod_base = OTHER; note = 2'-deoxy-2'-fluorouridine-3'-phosphate
  modified_base 12: mod_base = OTHER; note = 2'-O-methylguanosine-3'-phosphate
  modified_base 13: mod_base = OTHER; note = 2'-O-methyladenosine-3'-phosphate
  modified_base 14: mod_base = OTHER; note = 2'-O-methylcytidine-3'-phosphate
  modified_base 15: mod_base = OTHER; note = 2'-O-methylguanosine-3'-phosphate
  modified_base 16: mod_base = OTHER; note = 2'-O-methylcytidine-3'-phosphate
  modified_base 17: mod_base = OTHER; note = 2'-O-methylcytidine-3'-phosphate
  modified_base 18: mod_base = OTHER; note = 2'-O-methylcytidine-3'-phosphate
  modified_base 19: mod_base = OTHER; note = 2'-O-methyladenosine-3'-phosphorothioate
  modified_base 20: mod_base = OTHER; note = 2'-O-methyluridine-3'-phosphorothioate
  modified_base 21: mod_base = OTHER; note = 2'-O-methyladenosine
tacctgaagctgacgcccata

SEQ ID NO: 357 - RNA, 21 nt, synthetic construct
  source 1..21: mol_type = other RNA
  modified_base 1: mod_base = OTHER; note = 2'-O-methylguanosine-3'-phosphorothioate
  modified_base 2: mod_base = OTHER; note = 2'-O-methylcytidine-3'-phosphorothioate
  modified_base 3: mod_base = OTHER; note = 2'-O-methylcytidine-3'-phosphate
  modified_base 4: mod_base = OTHER; note = 2'-O-methylcytidine-3'-phosphate
  modified_base 5: mod_base = OTHER; note = 2'-O-methyladenosine-3'-phosphate
  modified_base 6: mod_base = OTHER; note = 2'-O-hexadecyl-uridine-3'-phosphate
  modified_base 7: mod_base = OTHER; note = 2'-deoxy-2'-fluoroguanosine-3'-phosphate
  modified_base 8: mod_base = OTHER; note = 2'-O-methyluridine-3'-phosphate
  modified_base 9: mod_base = OTHER; note = 2'-deoxy-2'-fluorouridine-3'-phosphate
  modified_base 10: mod_base = OTHER; note = 2'-deoxy-2'-fluorouridine-3'-phosphate
  modified_base 11: mod_base = OTHER; note = 2'-deoxy-2'-fluorocytidine-3'-phosphate
  modified_base 12: mod_base = OTHER; note = 2'-O-methyluridine-3'-phosphate
  modified_base 13: mod_base = OTHER; note = 2'-O-methylcytidine-3'-phosphate
  modified_base 14: mod_base = OTHER; note = 2'-O-methyladenosine-3'-phosphate
  modified_base 15: mod_base = OTHER; note = 2'-O-methyluridine-3'-phosphate
  modified_base 16: mod_base = OTHER; note = 2'-O-methylguanosine-3'-phosphate
  modified_base 17: mod_base = OTHER; note = 2'-O-methylguanosine-3'-phosphate
  modified_base 18: mod_base = OTHER; note = 2'-O-methyluridine-3'-phosphate
  modified_base 19: mod_base = OTHER; note = 2'-O-methylcytidine-3'-phosphorothioate
  modified_base 20: mod_base = OTHER; note = 2'-O-methyladenosine-3'-phosphorothioate
  modified_base 21: mod_base = OTHER; note = 2'-O-methyladenosine
gcccatgtttctcatggtcaa

SEQ ID NO: 358 - RNA, 21 nt, synthetic construct
  source 1..21: mol_type = other RNA
  modified_base 1: mod_base = OTHER; note = 2'-O-methylguanosine-3'-phosphorothioate
  modified_base 2: mod_base = OTHER; note = 2'-O-methyluridine-3'-phosphorothioate
  modified_base 3: mod_base = OTHER; note = 2'-O-methylcytidine-3'-phosphate
  modified_base 4: mod_base = OTHER; note = 2'-O-methyladenosine-3'-phosphate
  modified_base 5: mod_base = OTHER; note = 2'-O-methyluridine-3'-phosphate
  modified_base 6: mod_base = OTHER; note = 2'-O-hexadecyl-guanosine-3'-phosphate
  modified_base 7: mod_base = OTHER; note = 2'-deoxy-2'-fluorocytidine-3'-phosphate
  modified_base 8: mod_base = OTHER; note = 2'-O-methylcytidine-3'-phosphate
  modified_base 9: mod_base = OTHER; note = 2'-deoxy-2'-fluoroadenosine-3'-phosphate
  modified_base 10: mod_base = OTHER; note = 2'-deoxy-2'-fluoroguanosine-3'-phosphate
  modified_base 11: mod_base = OTHER; note = 2'-deoxy-2'-fluoroguanosine-3'-phosphate
  modified_base 12: mod_base = OTHER; note = 2'-O-methylcytidine-3'-phosphate
  modified_base 13: mod_base = OTHER; note = 2'-O-methyladenosine-3'-phosphate
  modified_base 14: mod_base = OTHER; note = 2'-O-methyluridine-3'-phosphate
  modified_base 15: mod_base = OTHER; note = 2'-O-methylguanosine-3'-phosphate
  modified_base 16: mod_base = OTHER; note = 2'-O-methyladenosine-3'-phosphate
  modified_base 17: mod_base = OTHER; note = 2'-O-methyluridine-3'-phosphate
  modified_base 18: mod_base = OTHER; note = 2'-O-methylcytidine-3'-phosphate
  modified_base 19: mod_base = OTHER; note = 2'-O-methyladenosine-3'-phosphorothioate
  modified_base 20: mod_base = OTHER; note = 2'-O-methylguanosine-3'-phosphorothioate
  modified_base 21: mod_base = OTHER; note = 2'-O-methyladenosine
gtcatgccaggcatgatcaga

SEQ ID NO: 359 - RNA, 21 nt, synthetic construct
  source 1..21: mol_type = other RNA
  modified_base 1: mod_base = OTHER; note = 2'-O-methylguanosine-3'-phosphorothioate
  modified_base 2: mod_base = OTHER; note = 2'-O-methylguanosine-3'-phosphorothioate
  modified_base 3: mod_base = OTHER; note = 2'-O-methylcytidine-3'-phosphate
  modified_base 4: mod_base = OTHER; note = 2'-O-methyladenosine-3'-phosphate
  modified_base 5: mod_base = OTHER; note = 2'-O-methyluridine-3'-phosphate
  modified_base 6: mod_base = OTHER; note = 2'-O-hexadecyl-guanosine-3'-phosphate
  modified_base 7: mod_base = OTHER; note = 2'-deoxy-2'-fluoroadenosine-3'-phosphate
  modified_base 8: mod_base = OTHER; note = 2'-O-methyluridine-3'-phosphate
  modified_base 9: mod_base = OTHER; note = 2'-deoxy-2'-fluorocytidine-3'-phosphate
  modified_base 10: mod_base = OTHER; note = 2'-deoxy-2'-fluoroadenosine-3'-phosphate
  modified_base 11: mod_base = OTHER; note = 2'-deoxy-2'-fluoroguanosine-3'-phosphate
  modified_base 12: mod_base = OTHER; note = 2'-O-methylcytidine-3'-phosphate
  modified_base 13: mod_base = OTHER; note = 2'-O-methylcytidine-3'-phosphate
  modified_base 14: mod_base = OTHER; note = 2'-O-methylguanosine-3'-phosphate
  modified_base 15: mod_base = OTHER; note = 2'-O-methylcytidine-3'-phosphate
  modified_base 16: mod_base = OTHER; note = 2'-O-methyladenosine-3'-phosphate
  modified_base 17: mod_base = OTHER; note = 2'-O-methyluridine-3'-phosphate
  modified_base 18: mod_base = OTHER; note = 2'-O-methyluridine-3'-phosphate
  modified_base 19: mod_base = OTHER; note = 2'-O-methylcytidine-3'-phosphorothioate
  modified_base 20: mod_base = OTHER; note = 2'-O-methyluridine-3'-phosphorothioate
  modified_base 21: mod_base = OTHER; note = 2'-O-methyladenosine
ggcatgatcagccgcattcta

SEQ ID NO: 360 - RNA, 21 nt, synthetic construct
  source 1..21: mol_type = other RNA
  modified_base 1: mod_base = OTHER; note = 2'-O-methyladenosine-3'-phosphorothioate
  modified_base 2: mod_base = OTHER; note = 2'-O-methylguanosine-3'-phosphorothioate
  modified_base 3: mod_base = OTHER; note = 2'-O-methylcytidine-3'-phosphate
  modified_base 4: mod_base = OTHER; note = 2'-O-methylcytidine-3'-phosphate
  modified_base 5: mod_base = OTHER; note = 2'-O-methylguanosine-3'-phosphate
  modified_base 6: mod_base = OTHER; note = 2'-O-hexadecyl-cytidine-3'-phosphate
  modified_base 7: mod_base = OTHER; note = 2'-deoxy-2'-fluoroadenosine-3'-phosphate
  modified_base 8: mod_base = OTHER; note = 2'-O-methyluridine-3'-phosphate
  modified_base 9: mod_base = OTHER; note = 2'-deoxy-2'-fluorouridine-3'-phosphate
  modified_base 10: mod_base = OTHER; note = 2'-deoxy-2'-fluorocytidine-3'-phosphate
  modified_base 11: mod_base = OTHER; note = 2'-deoxy-2'-fluorouridine-3'-phosphate
  modified_base 12: mod_base = OTHER; note = 2'-O-methylguanosine-3'-phosphate
  modified_base 13: mod_base = OTHER; note = 2'-O-methyluridine-3'-phosphate
  modified_base 14: mod_base = OTHER; note = 2'-O-methyladenosine-3'-phosphate
  modified_base 15: mod_base = OTHER; note = 2'-O-methylcytidine-3'-phosphate
  modified_base 16: mod_base = OTHER; note = 2'-O-methylcytidine-3'-phosphate
  modified_base 17: mod_base = OTHER; note = 2'-O-methylcytidine-3'-phosphate
  modified_base 18: mod_base = OTHER; note = 2'-O-methyladenosine-3'-phosphate
  modified_base 19: mod_base = OTHER; note = 2'-O-methylguanosine-3'-phosphorothioate
  modified_base 20: mod_base = OTHER; note = 2'-O-methyladenosine-3'-phosphorothioate
  modified_base 21: mod_base = OTHER; note = 2'-O-methyladenosine
agccgcattctgtacccagaa

SEQ ID NO: 361 - RNA, 21 nt, synthetic construct
  source 1..21: mol_type = other RNA
  modified_base 1: mod_base = OTHER; note = 2'-O-methylguanosine-3'-phosphorothioate
  modified_base 2: mod_base = OTHER; note = 2'-O-methyluridine-3'-phosphorothioate
  modified_base 3: mod_base = OTHER; note = 2'-O-methyladenosine-3'-phosphate
  modified_base 4: mod_base = OTHER; note = 2'-O-methylcytidine-3'-phosphate
  modified_base 5: mod_base = OTHER; note = 2'-O-methylcytidine-3'-phosphate
  modified_base 6: mod_base = OTHER; note = 2'-O-hexadecyl-cytidine-3'-phosphate
  modified_base 7: mod_base = OTHER; note = 2'-deoxy-2'-fluoroadenosine-3'-phosphate
  modified_base 8: mod_base = OTHER; note = 2'-O-methylguanosine-3'-phosphate
  modified_base 9: mod_base = OTHER; note = 2'-deoxy-2'-fluoroadenosine-3'-phosphate
  modified_base 10: mod_base = OTHER; note = 2'-deoxy-2'-fluorocytidine-3'-phosphate
  modified_base 11: mod_base = OTHER; note = 2'-deoxy-2'-fluoroguanosine-3'-phosphate
  modified_base 12: mod_base = OTHER; note = 2'-O-methyladenosine-3'-phosphate
  modified_base 13: mod_base = OTHER; note = 2'-O-methylguanosine-3'-phosphate
  modified_base 14: mod_base = OTHER; note = 2'-O-methylguanosine-3'-phosphate
  modified_base 15: mod_base = OTHER; note = 2'-O-methyluridine-3'-phosphate
  modified_base 16: mod_base = OTHER; note = 2'-O-methylguanosine-3'-phosphate
  modified_base 17: mod_base = OTHER; note = 2'-O-methylguanosine-3'-phosphate
  modified_base 18: mod_base = OTHER; note = 2'-O-methylcytidine-3'-phosphate
  modified_base 19: mod_base = OTHER; note = 2'-O-methylguanosine-3'-phosphorothioate
  modified_base 20: mod_base = OTHER; note = 2'-O-methyluridine-3'-phosphorothioate
  modified_base 21: mod_base = OTHER; note = 2'-O-methyladenosine
gtacccagacgaggtggcgta

SEQ ID NO: 362 - RNA, 21 nt, synthetic construct
  source 1..21: mol_type = other RNA
  modified_base 1: mod_base = OTHER; note = 2'-O-methyladenosine-3'-phosphorothioate
  modified_base 2: mod_base = OTHER; note = 2'-O-methylguanosine-3'-phosphorothioate
  modified_base 3: mod_base = OTHER; note = 2'-O-methylguanosine-3'-phosphate
  modified_base 4: mod_base = OTHER; note = 2'-O-methyluridine-3'-phosphate
  modified_base 5: mod_base = OTHER; note = 2'-O-methylguanosine-3'-phosphate
  modified_base 6: mod_base = OTHER; note = 2'-O-hexadecyl-guanosine-3'-phosphate
  modified_base 7: mod_base = OTHER; note = 2'-deoxy-2'-fluoroguanosine-3'-phosphate
  modified_base 8: mod_base = OTHER; note = 2'-O-methylcytidine-3'-phosphate
  modified_base 9: mod_base = OTHER; note = 2'-deoxy-2'-fluorouridine-3'-phosphate
  modified_base 10: mod_base = OTHER; note = 2'-deoxy-2'-fluoroguanosine-3'-phosphate
  modified_base 11: mod_base = OTHER; note = 2'-deoxy-2'-fluorocytidine-3'-phosphate
  modified_base 12: mod_base = OTHER; note = 2'-O-methyluridine-3'-phosphate
  modified_base 13: mod_base = OTHER; note = 2'-O-methylcytidine-3'-phosphate
  modified_base 14: mod_base = OTHER; note = 2'-O-methylcytidine-3'-phosphate
  modified_base 15: mod_base = OTHER; note = 2'-O-methyladenosine-3'-phosphate
  modified_base 16: mod_base = OTHER; note = 2'-O-methyladenosine-3'-phosphate
  modified_base 17: mod_base = OTHER; note = 2'-O-methylcytidine-3'-phosphate
  modified_base 18: mod_base = OTHER; note = 2'-O-methyladenosine-3'-phosphate
  modified_base 19: mod_base = OTHER; note = 2'-O-methyluridine-3'-phosphorothioate
  modified_base 20: mod_base = OTHER; note = 2'-O-methylcytidine-3'-phosphorothioate
  modified_base 21: mod_base = OTHER; note = 2'-O-methyladenosine
aggtgggctgctccaacatca

SEQ ID NO: 363 - RNA, 21 nt, synthetic construct
  source 1..21: mol_type = other RNA
  modified_base 1: mod_base = OTHER; note = 2'-O-methylguanosine-3'-phosphorothioate
  modified_base 2: mod_base = OTHER; note = 2'-O-methylcytidine-3'-phosphorothioate
  modified_base 3: mod_base = OTHER; note = 2'-O-methyluridine-3'-phosphate
  modified_base 4: mod_base = OTHER; note = 2'-O-methylcytidine-3'-phosphate
  modified_base 5: mod_base = OTHER; note = 2'-O-methylcytidine-3'-phosphate
  modified_base 6: mod_base = OTHER; note = 2'-O-hexadecyl-adenosine-3'-phosphate
  modified_base 7: mod_base = OTHER; note = 2'-deoxy-2'-fluoroadenosine-3'-phosphate
  modified_base 8: mod_base = OTHER; note = 2'-O-methylcytidine-3'-phosphate
  modified_base 9: mod_base = OTHER; note = 2'-deoxy-2'-fluoroadenosine-3'-phosphate
  modified_base 10: mod_base = OTHER; note = 2'-deoxy-2'-fluorouridine-3'-phosphate
  modified_base 11: mod_base = OTHER; note = 2'-deoxy-2'-fluorocytidine-3'-phosphate
  modified_base 12: mod_base = OTHER; note = 2'-O-methylguanosine-3'-phosphate
  modified_base 13: mod_base = OTHER; note = 2'-O-methylcytidine-3'-phosphate
  modified_base 14: mod_base = OTHER; note = 2'-O-methylcytidine-3'-phosphate
  modified_base 15: mod_base = OTHER; note = 2'-O-methyluridine-3'-phosphate
  modified_base 16: mod_base = OTHER; note = 2'-O-methyladenosine-3'-phosphate
  modified_base 17: mod_base = OTHER; note = 2'-O-methylcytidine-3'-phosphate
  modified_base 18: mod_base = OTHER; note = 2'-O-methylcytidine-3'-phosphate
  modified_base 19: mod_base = OTHER; note = 2'-O-methylcytidine-3'-phosphorothioate
  modified_base 20: mod_base = OTHER; note = 2'-O-methylguanosine-3'-phosphorothioate
  modified_base 21: mod_base = OTHER; note = 2'-O-methyladenosine
gctccaacatcgcctacccga

SEQ ID NO: 364 - RNA, 21 nt, synthetic construct
  source 1..21: mol_type = other RNA
  modified_base 1: mod_base = OTHER; note = 2'-O-methylcytidine-3'-phosphorothioate
  modified_base 2: mod_base = OTHER; note = 2'-O-methyluridine-3'-phosphorothioate
  modified_base 3: mod_base = OTHER; note = 2'-O-methylcytidine-3'-phosphate
  modified_base 4: mod_base = OTHER; note = 2'-O-methylguanosine-3'-phosphate
  modified_base 5: mod_base = OTHER; note = 2'-O-methyluridine-3'-phosphate
  modified_base 6: mod_base = OTHER; note = 2'-O-hexadecyl-cytidine-3'-phosphate
  modified_base 7: mod_base = OTHER; note = 2'-deoxy-2'-fluoroguanosine-3'-phosphate
  modified_base 8: mod_base = OTHER; note = 2'-O-methyluridine-3'-phosphate
  modified_base 9: mod_base = OTHER; note = 2'-deoxy-2'-fluoroguanosine-3'-phosphate
  modified_base 10: mod_base = OTHER; note = 2'-deoxy-2'-fluoroadenosine-3'-phosphate
  modified_base 11: mod_base = OTHER; note = 2'-deoxy-2'-fluoroadenosine-3'-phosphate
  modified_base 12: mod_base = OTHER; note = 2'-O-methylguanosine-3'-phosphate
  modified_base 13: mod_base = OTHER; note = 2'-O-methylcytidine-3'-phosphate
  modified_base 14: mod_base = OTHER; note = 2'-O-methyluridine-3'-phosphate
  modified_base 15: mod_base = OTHER; note = 2'-O-methylcytidine-3'-phosphate
  modified_base 16: mod_base = OTHER; note = 2'-O-methyladenosine-3'-phosphate
  modified_base 17: mod_base = OTHER; note = 2'-O-methyluridine-3'-phosphate
  modified_base 18: mod_base = OTHER; note = 2'-O-methylguanosine-3'-phosphate
  modified_base 19: mod_base = OTHER; note = 2'-O-methylcytidine-3'-phosphorothioate
  modified_base 20: mod_base = OTHER; note = 2'-O-methylcytidine-3'-phosphorothioate
  modified_base 21: mod_base = OTHER; note = 2'-O-methyladenosine
ctcgtcgtgaagctcatgcca

SEQ ID NO: 365 - RNA, 21 nt, synthetic construct
  source 1..21: mol_type = other RNA
  modified_base 1: mod_base = OTHER; note = 2'-O-methyladenosine-3'-phosphorothioate
  modified_base 2: mod_base = OTHER; note = 2'-O-methyladenosine-3'-phosphorothioate
  modified_base 3: mod_base = OTHER; note = 2'-O-methylguanosine-3'-phosphate
  modified_base 4: mod_base = OTHER; note = 2'-O-methylcytidine-3'-phosphate
  modified_base 5: mod_base = OTHER; note = 2'-O-methyluridine-3'-phosphate
  modified_base 6: mod_base = OTHER; note = 2'-O-hexadecyl-cytidine-3'-phosphate
  modified_base 7: mod_base = OTHER; note = 2'-deoxy-2'-fluoroadenosine-3'-phosphate
  modified_base 8: mod_base = OTHER; note = 2'-O-methyluridine-3'-phosphate
  modified_base 9: mod_base = OTHER; note = 2'-deoxy-2'-fluoroguanosine-3'-phosphate
  modified_base 10: mod_base = OTHER; note = 2'-deoxy-2'-fluorocytidine-3'-phosphate
  modified_base 11: mod_base = OTHER; note = 2'-deoxy-2'-fluorocytidine-3'-phosphate
  modified_base 12: mod_base = OTHER; note = 2'-O-methylcytidine-3'-phosphate
  modified_base 13: mod_base = OTHER; note = 2'-O-methyladenosine-3'-phosphate
  modified_base 14: mod_base = OTHER; note = 2'-O-methyladenosine-3'-phosphate
  modified_base 15: mod_base = OTHER; note = 2'-O-methylcytidine-3'-phosphate
  modified_base 16: mod_base = OTHER; note = 2'-O-methylguanosine-3'-phosphate
  modified_base 17: mod_base = OTHER; note = 2'-O-methylguanosine-3'-phosphate
  modified_base 18: mod_base = OTHER; note = 2'-O-methyluridine-3'-phosphate
  modified_base 19: mod_base = OTHER; note = 2'-O-methylcytidine-3'-phosphorothioate
  modified_base 20: mod_base = OTHER; note = 2'-O-methyluridine-3'-phosphorothioate
  modified_base 21: mod_base = OTHER; note = 2'-O-methyladenosine
aagctcatgcccaacggtcta

SEQ ID NO: 366 - RNA, 21 nt, synthetic construct
  source 1..21: mol_type = other RNA
  modified_base 1: mod_base = OTHER; note = 2'-O-methylguanosine-3'-phosphorothioate
  modified_base 2: mod_base = OTHER; note = 2'-O-methylguanosine-3'-phosphorothioate
  modified_base 3: mod_base = OTHER; note = 2'-O-methyluridine-3'-phosphate
  modified_base 4: mod_base = OTHER; note = 2'-O-methylcytidine-3'-phosphate
  modified_base 5: mod_base = OTHER; note = 2'-O-methyluridine-3'-phosphate
  modified_base 6: mod_base = OTHER; note = 2'-O-hexadecyl-guanosine-3'-phosphate
  modified_base 7: mod_base = OTHER; note = 2'-deoxy-2'-fluorocytidine-3'-phosphate
  modified_base 8: mod_base = OTHER; note = 2'-O-methylguanosine-3'-phosphate
  modified_base 9: mod_base = OTHER; note = 2'-deoxy-2'-fluorocytidine-3'-phosphate
  modified_base 10: mod_base = OTHER; note = 2'-deoxy-2'-fluoroguanosine-3'-phosphate
  modified_base 11: mod_base = OTHER; note = 2'-deoxy-2'-fluoroguanosine-3'-phosphate
  modified_base 12: mod_base = OTHER; note = 2'-O-methyladenosine-3'-phosphate
  modified_base 13: mod_base = OTHER; note = 2'-O-methylcytidine-3'-phosphate
  modified_base 14: mod_base = OTHER; note = 2'-O-methyluridine-3'-phosphate
  modified_base 15: mod_base = OTHER; note = 2'-O-methylcytidine-3'-phosphate
  modified_base 16: mod_base = OTHER; note = 2'-O-methyladenosine-3'-phosphate
  modified_base 17: mod_base = OTHER; note = 2'-O-methyluridine-3'-phosphate
  modified_base 18: mod_base = OTHER; note = 2'-O-methylguanosine-3'-phosphate
  modified_base 19: mod_base = OTHER; note = 2'-O-methylcytidine-3'-phosphorothioate
  modified_base 20: mod_base = OTHER; note = 2'-O-methyluridine-3'-phosphorothioate
  modified_base 21: mod_base = OTHER; note = 2'-O-methyladenosine
ggtctgcgcggactcatgcta

SEQ ID NO: 367 - RNA, 21 nt, synthetic construct
  source 1..21: mol_type = other RNA
  modified_base 1: mod_base = OTHER; note = 2'-O-methylguanosine-3'-phosphorothioate
  modified_base 2: mod_base = OTHER; note = 2'-O-methylguanosine-3'-phosphorothioate
  modified_base 3: mod_base = OTHER; note = 2'-O-methyladenosine-3'-phosphate
  modified_base 4: mod_base = OTHER; note = 2'-O-methylcytidine-3'-phosphate
  modified_base 5: mod_base = OTHER; note = 2'-O-methyluridine-3'-phosphate
  modified_base 6: mod_base = OTHER; note = 2'-O-hexadecyl-cytidine-3'-phosphate
  modified_base 7: mod_base = OTHER; note = 2'-deoxy-2'-fluoroadenosine-3'-phosphate
  modified_base 8: mod_base = OTHER; note = 2'-O-methyluridine-3'-phosphate
  modified_base 9: mod_base = OTHER; note = 2'-deoxy-2'-fluoroguanosine-3'-phosphate
  modified_base 10: mod_base = OTHER; note = 2'-deoxy-2'-fluorocytidine-3'-phosphate
  modified_base 11: mod_base = OTHER; note = 2'-deoxy-2'-fluorouridine-3'-phosphate
  modified_base 12: mod_base = OTHER; note = 2'-O-methylguanosine-3'-phosphate
  modified_base 13: mod_base = OTHER; note = 2'-O-methylguanosine-3'-phosphate
  modified_base 14: mod_base = OTHER; note = 2'-O-methylcytidine-3'-phosphate
  modified_base 15: mod_base = OTHER; note = 2'-O-methylguanosine-3'-phosphate
  modified_base 16: mod_base = OTHER; note = 2'-O-methylguanosine-3'-phosphate
  modified_base 17: mod_base = OTHER; note = 2'-O-methyluridine-3'-phosphate
  modified_base 18: mod_base = OTHER; note = 2'-O-methylcytidine-3'-phosphate
  modified_base 19: mod_base = OTHER; note = 2'-O-methyladenosine-3'-phosphorothioate
  modified_base 20: mod_base = OTHER; note = 2'-O-methyluridine-3'-phosphorothioate
  modified_base 21: mod_base = OTHER; note = 2'-O-methyladenosine
ggactcatgctggcggtcata

SEQ ID NO: 368 - RNA, 21 nt, synthetic construct
  source 1..21: mol_type = other RNA
  modified_base 1: mod_base = OTHER; note = 2'-O-methylguanosine-3'-phosphorothioate
  modified_base 2: mod_base = OTHER; note = 2'-O-methylcytidine-3'-phosphorothioate
  modified_base 3: mod_base = OTHER; note = 2'-O-methyluridine-3'-phosphate
  modified_base 4: mod_base = OTHER; note = 2'-O-methylguanosine-3'-phosphate
  modified_base 5: mod_base = OTHER; note = 2'-O-methylguanosine-3'-phosphate
  modified_base 6: mod_base = OTHER; note = 2'-O-hexadecyl-cytidine-3'-phosphate
  modified_base 7: mod_base = OTHER; note = 2'-deoxy-2'-fluorocytidine-3'-phosphate
  modified_base 8: mod_base = OTHER; note = 2'-O-methylguanosine-3'-phosphate
  modified_base 9: mod_base = OTHER; note = 2'-deoxy-2'-fluorocytidine-3'-phosphate
  modified_base 10: mod_base = OTHER; note = 2'-deoxy-2'-fluoroguanosine-3'-phosphate
  modified_base 11: mod_base = OTHER; note = 2'-deoxy-2'-fluorocytidine-3'-phosphate
  modified_base 12: mod_base = OTHER; note = 2'-O-methyluridine-3'-phosphate
  modified_base 13: mod_base = OTHER; note = 2'-O-methylcytidine-3'-phosphate
  modified_base 14: mod_base = OTHER; note = 2'-O-methyladenosine-3'-phosphate
  modified_base 15: mod_base = OTHER; note = 2'-O-methyluridine-3'-phosphate
  modified_base 16: mod_base = OTHER; note = 2'-O-methylguanosine-3'-phosphate
  modified_base 17: mod_base = OTHER; note = 2'-O-methyluridine-3'-phosphate
  modified_base 18: mod_base = OTHER; note = 2'-O-methylcytidine-3'-phosphate
  modified_base 19: mod_base = OTHER; note = 2'-O-methylcytidine-3'-phosphorothioate
  modified_base 20: mod_base = OTHER; note = 2'-O-methyluridine-3'-phosphorothioate
  modified_base 21: mod_base = OTHER; note = 2'-O-methyladenosine
gctggccgcgctcatgtccta

SEQ ID NO: 369 - RNA, 21 nt, synthetic construct
  source 1..21: mol_type = other RNA
  modified_base 1: mod_base = OTHER; note = 2'-O-methylguanosine-3'-phosphorothioate
  modified_base 2: mod_base = OTHER; note = 2'-O-methyluridine-3'-phosphorothioate
  modified_base 3: mod_base = OTHER; note = 2'-O-methylcytidine-3'-phosphate
  modified_base 4: mod_base = OTHER; note = 2'-O-methylcytidine-3'-phosphate
  modified_base 5: mod_base = OTHER; note = 2'-O-methyluridine-3'-phosphate
  modified_base 6: mod_base = OTHER; note = 2'-O-hexadecyl-cytidine-3'-phosphate
  modified_base 7: mod_base = OTHER; note = 2'-deoxy-2'-fluoroguanosine-3'-phosphate
  modified_base 8: mod_base = OTHER; note = 2'-O-methylcytidine-3'-phosphate
  modified_base 9: mod_base = OTHER; note = 2'-deoxy-2'-fluorouridine-3'-phosphate
  modified_base 10: mod_base = OTHER; note = 2'-deoxy-2'-fluoroguanosine-3'-phosphate
  modified_base 11: mod_base = OTHER; note = 2'-deoxy-2'-fluoroguanosine-3'-phosphate
  modified_base 12: mod_base = OTHER; note = 2'-O-methylcytidine-3'-phosphate
  modified_base 13: mod_base = OTHER; note = 2'-O-methylcytidine-3'-phosphate
  modified_base 14: mod_base = OTHER; note = 2'-O-methyluridine-3'-phosphate
  modified_base 15: mod_base = OTHER; note = 2'-O-methylcytidine-3'-phosphate
  modified_base 16: mod_base = OTHER; note = 2'-O-methylcytidine-3'-phosphate
  modified_base 17: mod_base = OTHER; note = 2'-O-methyladenosine-3'-phosphate
  modified_base 18: mod_base = OTHER; note = 2'-O-methyluridine-3'-phosphate
  modified_base 19: mod_base = OTHER; note = 2'-O-methylcytidine-3'-phosphorothioate
  modified_base 20: mod_base = OTHER; note = 2'-O-methyluridine-3'-phosphorothioate
  modified_base 21: mod_base = OTHER; note = 2'-O-methyladenosine
gtcctcgctggcctccatcta

SEQ ID NO: 370 - RNA, 21 nt, synthetic construct
  source 1..21: mol_type = other RNA
  modified_base 1: mod_base = OTHER; note = 2'-O-methylguanosine-3'-phosphorothioate
  modified_base 2: mod_base = OTHER; note = 2'-O-methylguanosine-3'-phosphorothioate
  modified_base 3: mod_base = OTHER; note = 2'-O-methylcytidine-3'-phosphate
  modified_base 4: mod_base = OTHER; note = 2'-O-methylcytidine-3'-phosphate
  modified_base 5: mod_base = OTHER; note = 2'-O-methyluridine-3'-phosphate
  modified_base 6: mod_base = OTHER; note = 2'-O-hexadecyl-cytidine-3'-phosphate
  modified_base 7: mod_base = OTHER; note = 2'-deoxy-2'-fluorocytidine-3'-phosphate
  modified_base 8: mod_base = OTHER; note = 2'-O-methyladenosine-3'-phosphate
  modified_base 9: mod_base = OTHER; note = 2'-deoxy-2'-fluorouridine-3'-phosphate
  modified_base 10: mod_base = OTHER; note = 2'-deoxy-2'-fluorocytidine-3'-phosphate
  modified_base 11: mod_base = OTHER; note = 2'-deoxy-2'-fluorouridine-3'-phosphate
  modified_base 12: mod_base = OTHER; note = 2'-O-methyluridine-3'-phosphate
  modified_base 13: mod_base = OTHER; note = 2'-O-methylcytidine-3'-phosphate
  modified_base 14: mod_base = OTHER; note = 2'-O-methyladenosine-3'-phosphate
  modified_base 15: mod_base = OTHER; note = 2'-O-methyladenosine-3'-phosphate
  modified_base 16: mod_base = OTHER; note = 2'-O-methylcytidine-3'-phosphate
  modified_base 17: mod_base = OTHER; note = 2'-O-methyladenosine-3'-phosphate
  modified_base 18: mod_base = OTHER; note = 2'-O-methylguanosine-3'-phosphate
  modified_base 19: mod_base = OTHER; note = 2'-O-methylcytidine-3'-phosphorothioate
  modified_base 20: mod_base = OTHER; note = 2'-O-methyladenosine-3'-phosphorothioate
  modified_base 21: mod_base = OTHER; note = 2'-O-methyladenosine
ggcctccatcttcaacagcaa

SEQ ID NO: 371 - RNA, 21 nt, synthetic construct
  source 1..21: mol_type = other RNA
  modified_base 1: mod_base = OTHER; note = 2'-O-methylcytidine-3'-phosphorothioate
  modified_base 2: mod_base = OTHER; note = 2'-O-methyluridine-3'-phosphorothioate
  modified_base 3: mod_base = OTHER; note = 2'-O-methyluridine-3'-phosphate
  modified_base 4: mod_base = OTHER; note = 2'-O-methylcytidine-3'-phosphate
  modified_base 5: mod_base = OTHER; note = 2'-O-methyladenosine-3'-phosphate
  modified_base 6: mod_base = OTHER; note = 2'-O-hexadecyl-adenosine-3'-phosphate
  modified_base 7: mod_base = OTHER; note = 2'-deoxy-2'-fluorocytidine-3'-phosphate
  modified_base 8: mod_base = OTHER; note = 2'-O-methyladenosine-3'-phosphate
  modified_base 9: mod_base = OTHER; note = 2'-deoxy-2'-fluoroguanosine-3'-phosphate
  modified_base 10: mod_base = OTHER; note = 2'-deoxy-2'-fluorocytidine-3'-phosphate
  modified_base 11: mod_base = OTHER; note = 2'-deoxy-2'-fluoroadenosine-3'-phosphate
  modified_base 12: mod_base = OTHER; note = 2'-O-methylguanosine-3'-phosphate
  modified_base 13: mod_base = OTHER; note = 2'-O-methylcytidine-3'-phosphate
  modified_base 14: mod_base = OTHER; note = 2'-O-methyladenosine-3'-phosphate
  modified_base 15: mod_base = OTHER; note = 2'-O-methylguanosine-3'-phosphate
  modified_base 16: mod_base = OTHER; note = 2'-O-methylcytidine-3'-phosphate
  modified_base 17: mod_base = OTHER; note = 2'-O-methyladenosine-3'-phosphate
  modified_base 18: mod_base = OTHER; note = 2'-O-methylcytidine-3'-phosphate
  modified_base 19: mod_base = OTHER; note = 2'-O-methylguanosine-3'-phosphorothioate
  modified_base 20: mod_base = OTHER; note = 2'-O-methylcytidine-3'-phosphorothioate
  modified_base 21: mod_base = OTHER; note = 2'-O-methyladenosine
cttcaacagcagcagcacgca

SEQ ID NO: 372 - RNA, 21 nt, synthetic construct
  source 1..21: mol_type = other RNA
  modified_base 1: mod_base = OTHER; note = 2'-O-methylcytidine-3'-phosphorothioate
  modified_base 2: mod_base = OTHER; note = 2'-O-methyladenosine-3'-phosphorothioate
  modified_base 3: mod_base = OTHER; note = 2'-O-methylguanosine-3'-phosphate
  modified_base 4: mod_base = OTHER; note = 2'-O-methylcytidine-3'-phosphate
  modified_base 5: mod_base = OTHER; note = 2'-O-methyladenosine-3'-phosphate
  modified_base 6: mod_base = OTHER; note = 2'-O-hexadecyl-guanosine-3'-phosphate
  modified_base 7: mod_base = OTHER; note = 2'-deoxy-2'-fluorocytidine-3'-phosphate
  modified_base 8: mod_base = OTHER; note = 2'-O-methyladenosine-3'-phosphate
  modified_base 9: mod_base = OTHER; note = 2'-deoxy-2'-fluorocytidine-3'-phosphate
  modified_base 10: mod_base = OTHER; note = 2'-deoxy-2'-fluoroguanosine-3'-phosphate
  modified_base 11: mod_base = OTHER; note = 2'-deoxy-2'-fluorocytidine-3'-phosphate
  modified_base 12: mod_base = OTHER; note = 2'-O-methyluridine-3'-phosphate
  modified_base 13: mod_base = OTHER; note = 2'-O-methylcytidine-3'-phosphate
  modified_base 14: mod_base = OTHER; note = 2'-O-methyluridine-3'-phosphate
  modified_base 15: mod_base = OTHER; note = 2'-O-methyluridine-3'-phosphate
  modified_base 16: mod_base = OTHER; note = 2'-O-methylcytidine-3'-phosphate
  modified_base 17: mod_base = OTHER; note = 2'-O-methyladenosine-3'-phosphate
  modified_base 18: mod_base = OTHER; note = 2'-O-methylcytidine-3'-phosphate
  modified_base 19: mod_base = OTHER; note = 2'-O-methylcytidine-3'-phosphorothioate
  modified_base 20: mod_base = OTHER; note = 2'-O-methyladenosine-3'-phosphorothioate
  modified_base 21: mod_base = OTHER; note = 2'-O-methyladenosine
cagcagcacgctcttcaccaa

SEQ ID NO: 373 - RNA, 21 nt, synthetic construct
  source 1..21: mol_type = other RNA
  modified_base 1: mod_base = OTHER; note = 2'-O-methylguanosine-3'-phosphorothioate
  modified_base 2: mod_base = OTHER; note = 2'-O-methylcytidine-3'-phosphorothioate
  modified_base 3: mod_base = OTHER; note = 2'-O-methyluridine-3'-phosphate
  modified_base 4: mod_base = OTHER; note = 2'-O-methylcytidine-3'-phosphate
  modified_base 5: mod_base = OTHER; note = 2'-O-methyluridine-3'-phosphate
  modified_base 6: mod_base = OTHER; note = 2'-O-hexadecyl-uridine-3'-phosphate
  modified_base 7: mod_base = OTHER; note = 2'-deoxy-2'-fluorocytidine-3'-phosphate
  modified_base 8: mod_base = OTHER; note = 2'-O-methyladenosine-3'-phosphate
  modified_base 9: mod_base = OTHER; note = 2'-deoxy-2'-fluorocytidine-3'-phosphate
  modified_base 10: mod_base = OTHER; note = 2'-deoxy-2'-fluorocytidine-3'-phosphate
  modified_base 11: mod_base = OTHER; note = 2'-deoxy-2'-fluoroadenosine-3'-phosphate
  modified_base 12: mod_base = OTHER; note = 2'-O-methyluridine-3'-phosphate
  modified_base 13: mod_base = OTHER; note = 2'-O-methylguanosine-3'-phosphate
  modified_base 14: mod_base = OTHER; note = 2'-O-methylguanosine-3'-phosphate
  modified_base 15: mod_base = OTHER; note = 2'-O-methyladenosine-3'-phosphate
  modified_base 16: mod_base = OTHER; note = 2'-O-methylcytidine-3'-phosphate
  modified_base 17: mod_base = OTHER; note = 2'-O-methyladenosine-3'-phosphate
  modified_base 18: mod_base = OTHER; note = 2'-O-methyluridine-3'-phosphate
  modified_base 19: mod_base = OTHER; note = 2'-O-methylcytidine-3'-phosphorothioate
  modified_base 20: mod_base = OTHER; note = 2'-O-methyluridine-3'-phosphorothioate
  modified_base 21: mod_base = OTHER; note = 2'-O-methyladenosine
gctcttcaccatggacatcta

SEQ ID NO: 374 - RNA, 21 nt, synthetic construct
  source 1..21: mol_type = other RNA
  modified_base 1: mod_base = OTHER; note = 2'-O-methyladenosine-3'-phosphorothioate
  modified_base 2: mod_base = OTHER; note = 2'-O-methyluridine-3'-phosphorothioate
  modified_base 3: mod_base = OTHER; note = 2'-O-methylguanosine-3'-phosphate
  modified_base 4: mod_base = OTHER; note = 2'-O-methylguanosine-3'-phosphate
  modified_base 5: mod_base = OTHER; note = 2'-O-methyladenosine-3'-phosphate
  modified_base 6: mod_base = OTHER; note = 2'-O-hexadecyl-cytidine-3'-phosphate
  modified_base 7: mod_base = OTHER; note = 2'-deoxy-2'-fluoroadenosine-3'-phosphate
  modified_base 8: mod_base = OTHER; note = 2'-O-methyluridine-3'-phosphate
  modified_base 9: mod_base = OTHER; note = 2'-deoxy-2'-fluorocytidine-3'-phosphate
  modified_base 10: mod_base = OTHER; note = 2'-deoxy-2'-fluorouridine-3'-phosphate
  modified_base 11: mod_base = OTHER; note = 2'-deoxy-2'-fluoroadenosine-3'-phosphate
  modified_base 12: mod_base = OTHER; note = 2'-O-methylcytidine-3'-phosphate
  modified_base 13: mod_base = OTHER; note = 2'-O-methyladenosine-3'-phosphate
  modified_base 14: mod_base = OTHER; note = 2'-O-methylcytidine-3'-phosphate
  modified_base 15: mod_base = OTHER; note = 2'-O-methylguanosine-3'-phosphate
  modified_base 16: mod_base = OTHER; note = 2'-O-methylcytidine-3'-phosphate
  modified_base 17: mod_base = OTHER; note = 2'-O-methylguanosine-3'-phosphate
  modified_base 18: mod_base = OTHER; note = 2'-O-methylcytidine-3'-phosphate
  modified_base 19: mod_base = OTHER; note = 2'-O-methylcytidine-3'-phosphorothioate
  modified_base 20: mod_base = OTHER; note = 2'-O-methyluridine-3'-phosphorothioate
  modified_base 21: mod_base = OTHER; note = 2'-O-methyladenosine
atggacatctacacgcgccta

SEQ ID NO: 375 - RNA, 21 nt, synthetic construct
  source 1..21: mol_type = other RNA
  modified_base 1: mod_base = OTHER; note = 2'-O-methylguanosine-3'-phosphorothioate
  modified_base 2: mod_base = OTHER; note = 2'-O-methylcytidine-3'-phosphorothioate
  modified_base 3: mod_base = OTHER; note = 2'-O-methyluridine-3'-phosphate
  modified_base 4: mod_base = OTHER; note = 2'-O-methylcytidine-3'-phosphate
  modified_base 5: mod_base = OTHER; note = 2'-O-methyluridine-3'-phosphate
  modified_base 6: mod_base = OTHER; note = 2'-O-hexadecyl-guanosine-3'-phosphate
  modified_base 7: mod_base = OTHER; note = 2'-deoxy-2'-fluoroguanosine-3'-phosphate
  modified_base 8: mod_base = OTHER; note = 2'-O-methylguanosine-3'-phosphate
  modified_base 9: mod_base = OTHER; note = 2'-deoxy-2'-fluorouridine-3'-phosphate
  modified_base 10: mod_base = OTHER; note = 2'-deoxy-2'-fluoroguanosine-3'-phosphate
  modified_base 11: mod_base = OTHER; note = 2'-deoxy-2'-fluoroguanosine-3'-phosphate
  modified_base 12: mod_base = OTHER; note = 2'-O-methyluridine-3'-phosphate
  modified_base 13: mod_base = OTHER; note = 2'-O-methylguanosine-3'-phosphate
  modified_base 14: mod_base = OTHER; note = 2'-O-methyluridine-3'-phosphate
  modified_base 15: mod_base = OTHER; note = 2'-O-methyluridine-3'-phosphate
  modified_base 16: mod_base = OTHER; note = 2'-O-methylcytidine-3'-phosphate
  modified_base 17: mod_base = OTHER; note = 2'-O-methyladenosine-3'-phosphate
  modified_base 18: mod_base = OTHER; note = 2'-O-methyluridine-3'-phosphate
  modified_base 19: mod_base = OTHER; note = 2'-O-methylcytidine-3'-phosphorothioate
  modified_base 20: mod_base = OTHER; note = 2'-O-methylguanosine-3'-phosphorothioate
  modified_base 21: mod_base = OTHER; note = 2'-O-methyladenosine
gctctgggtggtgttcatcga

SEQ ID NO: 376 - RNA, 21 nt, synthetic construct
  source 1..21: mol_type = other RNA
  modified_base 1: mod_base = OTHER; note = 2'-O-methylguanosine-3'-phosphorothioate
  modified_base 2: mod_base = OTHER; note = 2'-O-methylguanosine-3'-phosphorothioate
  modified_base 3: mod_base = OTHER; note = 2'-O-methyluridine-3'-phosphate
  modified_base 4: mod_base = OTHER; note = 2'-O-methylguanosine-3'-phosphate
  modified_base 5: mod_base = OTHER; note = 2'-O-methyluridine-3'-phosphate
  modified_base 6: mod_base = OTHER; note = 2'-O-hexadecyl-uridine-3'-phosphate
  modified_base 7: mod_base = OTHER; note = 2'-deoxy-2'-fluorocytidine-3'-phosphate
  modified_base 8: mod_base = OTHER; note = 2'-O-methyladenosine-3'-phosphate
  modified_base 9: mod_base = OTHER; note = 2'-deoxy-2'-fluorouridine-3'-phosphate
  modified_base 10: mod_base = OTHER; note = 2'-deoxy-2'-fluorocytidine-3'-phosphate
  modified_base 11: mod_base = OTHER; note = 2'-deoxy-2'-fluoroguanosine-3'-phosphate
  modified_base 12: mod_base = OTHER; note = 2'-O-methyluridine-3'-phosphate
  modified_base 13: mod_base = OTHER; note = 2'-O-methylguanosine-3'-phosphate
  modified_base 14: mod_base = OTHER; note = 2'-O-methylguanosine-3'-phosphate
  modified_base 15: mod_base = OTHER; note = 2'-O-methyluridine-3'-phosphate
  modified_base 16: mod_base = OTHER; note = 2'-O-methyladenosine-3'-phosphate
  modified_base 17: mod_base = OTHER; note = 2'-O-methylguanosine-3'-phosphate
  modified_base 18: mod_base = OTHER; note = 2'-O-methyluridine-3'-phosphate
  modified_base 19: mod_base = OTHER; note = 2'-O-methylguanosine-3'-phosphorothioate
  modified_base 20: mod_base = OTHER; note = 2'-O-methyluridine-3'-phosphorothioate
  modified_base 21: mod_base = OTHER; note = 2'-O-methyladenosine
ggtgttcatcgtggtagtgta

SEQ ID NO: 377 - RNA, 21 nt, synthetic construct
  source 1..21: mol_type = other RNA
  modified_base 1: mod_base = OTHER; note = 2'-O-methylcytidine-3'-phosphorothioate
  modified_base 2: mod_base = OTHER; note = 2'-O-methylguanosine-3'-phosphorothioate
  modified_base 3: mod_base = OTHER; note = 2'-O-methyluridine-3'-phosphate
  modified_base 4: mod_base = OTHER; note = 2'-O-methylguanosine-3'-phosphate
  modified_base 5: mod_base = OTHER; note = 2'-O-methylguanosine-3'-phosphate
  modified_base 6: mod_base = OTHER; note = 2'-O-hexadecyl-uridine-3'-phosphate
  modified_base 7: mod_base = OTHER; note = 2'-deoxy-2'-fluoroadenosine-3'-phosphate
  modified_base 8: mod_base = OTHER; note = 2'-O-methylguanosine-3'-phosphate
  modified_base 9: mod_base = OTHER; note = 2'-deoxy-2'-fluorouridine-3'-phosphate
  modified_base 10: mod_base = OTHER; note = 2'-deoxy-2'-fluoroguanosine-3'-phosphate
  modified_base 11: mod_base = OTHER; note = 2'-deoxy-2'-fluorouridine-3'-phosphate
  modified_base 12: mod_base = OTHER; note = 2'-O-methylcytidine-3'-phosphate
  modified_base 13: mod_base = OTHER; note = 2'-O-methylguanosine-3'-phosphate
  modified_base 14: mod_base = OTHER; note = 2'-O-methylguanosine-3'-phosphate
  modified_base 15: mod_base = OTHER; note = 2'-O-methyluridine-3'-phosphate
  modified_base 16: mod_base = OTHER; note = 2'-O-methylguanosine-3'-phosphate
  modified_base 17: mod_base = OTHER; note = 2'-O-methylguanosine-3'-phosphate
  modified_base 18: mod_base = OTHER; note = 2'-O-methylcytidine-3'-phosphate
  modified_base 19: mod_base = OTHER; note = 2'-O-methylcytidine-3'-phosphorothioate
  modified_base 20: mod_base = OTHER; note = 2'-O-methyluridine-3'-phosphorothioate
  modified_base 21: mod_base = OTHER; note = 2'-O-methyladenosine
cgtggtagtgtcggtggccta

SEQ ID NO: 378 - RNA, 21 nt, synthetic construct
  source 1..21: mol_type = other RNA
  modified_base 1: mod_base = OTHER; note = 2'-O-methylcytidine-3'-phosphorothioate
  modified_base 2: mod_base = OTHER; note = 2'-O-methyladenosine-3'-phosphorothioate
  modified_base 3: mod_base = OTHER; note = 2'-O-methylguanosine-3'-phosphate
  modified_base 4: mod_base = OTHER; note = 2'-O-methylcytidine-3'-phosphate
  modified_base 5: mod_base = OTHER; note = 2'-O-methyluridine-3'-phosphate
  modified_base 6: mod_base = OTHER; note = 2'-O-hexadecyl-cytidine-3'-phosphate
  modified_base 7: mod_base = OTHER; note = 2'-deoxy-2'-fluorouridine-3'-phosphate
  modified_base 8: mod_base = OTHER; note = 2'-O-methyluridine-3'-phosphate
  modified_base 9: mod_base = OTHER; note = 2'-deoxy-2'-fluorocytidine-3'-phosphate
  modified_base 10: mod_base = OTHER; note = 2'-deoxy-2'-fluoroguanosine-3'-phosphate
  modified_base 11: mod_base = OTHER; note = 2'-deoxy-2'-fluoroadenosine-3'-phosphate
  modified_base 12: mod_base = OTHER; note = 2'-O-methyluridine-3'-phosphate
  modified_base 13: mod_base = OTHER; note = 2'-O-methyluridine-3'-phosphate
  modified_base 14: mod_base = OTHER; note = 2'-O-methyladenosine-3'-phosphate
  modified_base 15: mod_base = OTHER; note = 2'-O-methylcytidine-3'-phosphate
  modified_base 16: mod_base = OTHER; note = 2'-O-methyladenosine-3'-phosphate
  modified_base 17: mod_base = OTHER; note = 2'-O-methyluridine-3'-phosphate
  modified_base 18: mod_base = OTHER; note = 2'-O-methylcytidine-3'-phosphate
  modified_base 19: mod_base = OTHER; note = 2'-O-methylcytidine-3'-phosphorothioate
  modified_base 20: mod_base = OTHER; note = 2'-O-methyladenosine-3'-phosphorothioate
  modified_base 21: mod_base = OTHER; note = 2'-O-methyladenosine
cagctcttcgattacatccaa

SEQ ID NO: 379 - RNA, 21 nt, synthetic construct
  source 1..21: mol_type = other RNA
  modified_base 1: mod_base = OTHER; note = 2'-O-methyladenosine-3'-phosphorothioate
  modified_base 2: mod_base = OTHER; note = 2'-O-methyluridine-3'-phosphorothioate
  modified_base 3: mod_base = OTHER; note = 2'-O-methyluridine-3'-phosphate
  modified_base 4: mod_base = OTHER; note = 2'-O-methyladenosine-3'-phosphate
  modified_base 5: mod_base = OTHER; note = 2'-O-methylcytidine-3'-phosphate
  modified_base 6: mod_base = OTHER; note = 2'-O-hexadecyl-adenosine-3'-phosphate
  modified_base 7: mod_base = OTHER; note = 2'-deoxy-2'-fluorouridine-3'-phosphate
  modified_base 8: mod_base = OTHER; note = 2'-O-methylcytidine-3'-phosphate
  modified_base 9: mod_base = OTHER; note = 2'-deoxy-2'-fluorocytidine-3'-phosphate
  modified_base 10: mod_base = OTHER; note = 2'-deoxy-2'-fluoroadenosine-3'-phosphate
  modified_base 11: mod_base = OTHER; note = 2'-deoxy-2'-fluoroguanosine-3'-phosphate
  modified_base 12: mod_base = OTHER; note = 2'-O-methylguanosine-3'-phosphate
  modified_base 13: mod_base = OTHER; note = 2'-O-methylcytidine-3'-phosphate
  modified_base 14: mod_base = OTHER; note = 2'-O-methyladenosine-3'-phosphate
  modified_base 15: mod_base = OTHER; note = 2'-O-methylguanosine-3'-phosphate
  modified_base 16: mod_base = OTHER; note = 2'-O-methyluridine-3'-phosphate
  modified_base 17: mod_base = OTHER; note = 2'-O-methylcytidine-3'-phosphate
  modified_base 18: mod_base = OTHER; note = 2'-O-methyluridine-3'-phosphate
  modified_base 19: mod_base = OTHER; note = 2'-O-methylcytidine-3'-phosphorothioate
  modified_base 20: mod_base = OTHER; note = 2'-O-methyluridine-3'-phosphorothioate
  modified_base 21: mod_base = OTHER; note = 2'-O-methyladenosine
attacatccaggcagtctcta

SEQ ID NO: 380 - RNA, 21 nt, synthetic construct
  source 1..21: mol_type = other RNA
  modified_base 1: mod_base = OTHER; note = 2'-O-methyladenosine-3'-phosphorothioate
  modified_base 2: mod_base = OTHER; note = 2'-O-methylguanosine-3'-phosphorothioate
  modified_base 3: mod_base = OTHER; note = 2'-O-methylguanosine-3'-phosphate
  modified_base 4: mod_base = OTHER; note = 2'-O-methylcytidine-3'-phosphate
  modified_base 5: mod_base = OTHER; note = 2'-O-methyladenosine-3'-phosphate
  modified_base 6: mod_base = OTHER; note = 2'-O-hexadecyl-guanosine-3'-phosphate
  modified_base 7: mod_base = OTHER; note = 2'-deoxy-2'-fluorouridine-3'-phosphate
  modified_base 8: mod_base = OTHER; note = 2'-O-methylcytidine-3'-phosphate
  modified_base 9: mod_base = OTHER; note = 2'-deoxy-2'-fluorouridine-3'-phosphate
  modified_base 10: mod_base = OTHER; note = 2'-deoxy-2'-fluorocytidine-3'-phosphate
  modified_base 11: mod_base = OTHER; note = 2'-deoxy-2'-fluorouridine-3'-phosphate
  modified_base 12: mod_base = OTHER; note = 2'-O-methyladenosine-3'-phosphate
  modified_base 13: mod_base = OTHER; note = 2'-O-methylguanosine-3'-phosphate
  modified_base 14: mod_base = OTHER; note = 2'-O-methylcytidine-3'-phosphate
  modified_base 15: mod_base = OTHER; note = 2'-O-methyluridine-3'-phosphate
  modified_base 16: mod_base = OTHER; note = 2'-O-methyladenosine-3'-phosphate
  modified_base 17: mod_base = OTHER; note = 2'-O-methylcytidine-3'-phosphate
  modified_base 18: mod_base = OTHER; note = 2'-O-methylcytidine-3'-phosphate
  modified_base 19: mod_base = OTHER; note = 2'-O-methyluridine-3'-phosphorothioate
  modified_base 20: mod_base = OTHER; note = 2'-O-methylguanosine-3'-phosphorothioate
  modified_base 21: mod_base = OTHER; note = 2'-O-methyladenosine
aggcagtctctagctacctga

SEQ ID NO: 381 - RNA, 21 nt, synthetic construct
  source 1..21: mol_type = other RNA
  modified_base 1: mod_base = OTHER; note = 2'-O-methyluridine-3'-phosphorothioate
  modified_base 2: mod_base = OTHER; note = 2'-O-methyluridine-3'-phosphorothioate
  modified_base 3: mod_base = OTHER; note = 2'-O-methylcytidine-3'-phosphate
  modified_base 4: mod_base = OTHER; note = 2'-O-methylguanosine-3'-phosphate
  modified_base 5: mod_base = OTHER; note = 2'-O-methyluridine-3'-phosphate
  modified_base 6: mod_base = OTHER; note = 2'-O-hexadecyl-guanosine-3'-phosphate
  modified_base 7: mod_base = OTHER; note = 2'-deoxy-2'-fluorocytidine-3'-phosphate
  modified_base 8: mod_base = OTHER; note = 2'-O-methyluridine-3'-phosphate
  modified_base 9: mod_base = OTHER; note = 2'-deoxy-2'-fluoroguanosine-3'-phosphate
  modified_base 10: mod_base = OTHER; note = 2'-deoxy-2'-fluoroguanosine-3'-phosphate
  modified_base 11: mod_base = OTHER; note = 2'-deoxy-2'-fluorocytidine-3'-phosphate
  modified_base 12: mod_base = OTHER; note = 2'-O-methylguanosine-3'-phosphate
  modified_base 13: mod_base = OTHER; note = 2'-O-methylcytidine-3'-phosphate
  modified_base 14: mod_base = OTHER; note = 2'-O-methyluridine-3'-phosphate
  modified_base 15: mod_base = OTHER; note = 2'-O-methylcytidine-3'-phosphate
  modified_base 16: mod_base = OTHER; note = 2'-O-methyluridine-3'-phosphate
  modified_base 17: mod_base = OTHER; note = 2'-O-methyluridine-3'-phosphate
  modified_base 18: mod_base = OTHER; note = 2'-O-methylcytidine-3'-phosphate
  modified_base 19: mod_base = OTHER; note = 2'-O-methylguanosine-3'-phosphorothioate
  modified_base 20: mod_base = OTHER; note = 2'-O-methyluridine-3'-phosphorothioate
  modified_base 21: mod_base = OTHER; note = 2'-O-methyladenosine
ttcgtgctggcgctcttcgta

SEQ ID NO: 382 - RNA, 21 nt, synthetic construct
  source 1..21: mol_type = other RNA
  modified_base 1: mod_base = OTHER; note = 2'-O-methyluridine-3'-phosphorothioate
  modified_base 2: mod_base = OTHER; note = 2'-O-methylguanosine-3'-phosphorothioate
  modified_base 3: mod_base = OTHER; note = 2'-O-methylcytidine-3'-phosphate
  modified_base 4: mod_base = OTHER; note = 2'-O-methylcytidine-3'-phosphate
  modified_base 5: mod_base = OTHER; note = 2'-O-methylguanosine-3'-phosphate
  modified_base 6: mod_base = OTHER; note = 2'-O-hexadecyl-cytidine-3'-phosphate
  modified_base 7: mod_base = OTHER; note = 2'-deoxy-2'-fluoroguanosine-3'-phosphate
  modified_base 8: mod_base = OTHER; note = 2'-O-methylcytidine-3'-phosphate
  modified_base 9: mod_base = OTHER; note = 2'-deoxy-2'-fluoroguanosine-3'-phosphate
  modified_base 10: mod_base = OTHER; note = 2'-deoxy-2'-fluorouridine-3'-phosphate
  modified_base 11: mod_base = OTHER; note = 2'-deoxy-2'-fluorouridine-3'-phosphate
  modified_base 12: mod_base = OTHER; note = 2'-O-methyladenosine-3'-phosphate
  modified_base 13: mod_base = OTHER; note = 2'-O-methyladenosine-3'-phosphate
  modified_base 14: mod_base = OTHER; note = 2'-O-methyluridine-3'-phosphate
  modified_base 15: mod_base = OTHER; note = 2'-O-methylguanosine-3'-phosphate
  modified_base 16: mod_base = OTHER; note = 2'-O-methyladenosine-3'-phosphate
  modified_base 17: mod_base = OTHER; note = 2'-O-methylguanosine-3'-phosphate
  modified_base 18: mod_base = OTHER; note = 2'-O-methylcytidine-3'-phosphate
  modified_base 19: mod_base = OTHER; note = 2'-O-methyladenosine-3'-phosphorothioate
  modified_base 20: mod_base = OTHER; note = 2'-O-methylguanosine-3'-phosphorothioate
  modified_base 21: mod_base = OTHER; note = 2'-O-methyladenosine
tgccgcgcgttaatgagcaga

SEQ ID NO: 383 - RNA, 21 nt, synthetic construct
  source 1..21: mol_type = other RNA
  modified_base 1: mod_base = OTHER; note = 2'-O-methylguanosine-3'-phosphorothioate
  modified_base 2: mod_base = OTHER; note = 2'-O-methylguanosine-3'-phosphorothioate
  modified_base 3: mod_base = OTHER; note = 2'-O-methylguanosine-3'-phosphate
  modified_base 4: mod_base = OTHER; note = 2'-O-methylcytidine-3'-phosphate
  modified_base 5: mod_base = OTHER; note = 2'-O-methylcytidine-3'-phosphate
  modified_base 6: mod_base = OTHER; note = 2'-O-hexadecyl-uridine-3'-phosphate
  modified_base 7: mod_base = OTHER; note = 2'-deoxy-2'-fluoroguanosine-3'-phosphate
  modified_base 8: mod_base = OTHER; note = 2'-O-methylguanosine-3'-phosphate
  modified_base 9: mod_base = OTHER; note = 2'-deoxy-2'-fluorocytidine-3'-phosphate
  modified_base 10: mod_base = OTHER; note = 2'-deoxy-2'-fluoroadenosine-3'-phosphate
  modified_base 11: mod_base = OTHER; note = 2'-deoxy-2'-fluorocytidine-3'-phosphate
  modified_base 12: mod_base = OTHER; note = 2'-O-methylguanosine-3'-phosphate
  modified_base 13: mod_base = OTHER; note = 2'-O-methylcytidine-3'-phosphate
  modified_base 14: mod_base = OTHER; note = 2'-O-methylcytidine-3'-phosphate
  modified_base 15: mod_base = OTHER; note = 2'-O-methyluridine-3'-phosphate
  modified_base 16: mod_base = OTHER; note = 2'-O-methylguanosine-3'-phosphate
  modified_base 17: mod_base = OTHER; note = 2'-O-methyladenosine-3'-phosphate
  modified_base 18: mod_base = OTHER; note = 2'-O-methyluridine-3'-phosphate
  modified_base 19: mod_base = OTHER; note = 2'-O-methyluridine-3'-phosphorothioate
  modified_base 20: mod_base = OTHER; note = 2'-O-methylcytidine-3'-phosphorothioate
  modified_base 21: mod_base = OTHER; note = 2'-O-methyladenosine
gggcctggcacgcctgattca

SEQ ID NO: 384 - RNA, 21 nt, synthetic construct
  source 1..21: mol_type = other RNA
  modified_base 1: mod_base = OTHER; note = 2'-O-methylcytidine-3'-phosphorothioate
  modified_base 2: mod_base = OTHER; note = 2'-O-methylguanosine-3'-phosphorothioate
  modified_base 3: mod_base = OTHER; note = 2'-O-methylcytidine-3'-phosphate
  modified_base 4: mod_base = OTHER; note = 2'-O-methylcytidine-3'-phosphate
  modified_base 5: mod_base = OTHER; note = 2'-O-methyluridine-3'-phosphate
  modified_base 6: mod_base = OTHER; note = 2'-O-hexadecyl-guanosine-3'-phosphate
  modified_base 7: mod_base = OTHER; note = 2'-deoxy-2'-fluoroadenosine-3'-phosphate
  modified_base 8: mod_base = OTHER; note = 2'-O-methyluridine-3'-phosphate
  modified_base 9: mod_base = OTHER; note = 2'-deoxy-2'-fluorouridine-3'-phosphate
  modified_base 10: mod_base = OTHER; note = 2'-deoxy-2'-fluorocytidine-3'-phosphate
  modified_base 11: mod_base = OTHER; note = 2'-deoxy-2'-fluorocytidine-3'-phosphate
  modified_base 12: mod_base = OTHER; note = 2'-O-methylcytidine-3'-phosphate
  modified_base 13: mod_base = OTHER; note = 2'-O-methylguanosine-3'-phosphate
  modified_base 14: mod_base = OTHER; note = 2'-O-methyladenosine-3'-phosphate
  modified_base 15: mod_base = OTHER; note = 2'-O-methylguanosine-3'-phosphate
  modified_base 16: mod_base = OTHER; note = 2'-O-methyluridine-3'-phosphate
  modified_base 17: mod_base = OTHER; note = 2'-O-methyluridine-3'-phosphate
  modified_base 18: mod_base = OTHER; note = 2'-O-methylcytidine-3'-phosphate
  modified_base 19: mod_base = OTHER; note = 2'-O-methyluridine-3'-phosphorothioate
  modified_base 20: mod_base = OTHER; note = 2'-O-methylcytidine-3'-phosphorothioate
  modified_base 21: mod_base = OTHER; note = 2'-O-methyladenosine
cgcctgattcccgagttctca

SEQ ID NO: 385 - RNA, 21 nt, synthetic construct
  source 1..21: mol_type = other RNA
  modified_base 1: mod_base = OTHER; note = 2'-O-methylcytidine-3'-phosphorothioate
  modified_base 2: mod_base = OTHER; note = 2'-O-methylcytidine-3'-phosphorothioate
  modified_base 3: mod_base = OTHER; note = 2'-O-methylcytidine-3'-phosphate
  modified_base 4: mod_base = OTHER; note = 2'-O-methylguanosine-3'-phosphate
  modified_base 5: mod_base = OTHER; note = 2'-O-methyladenosine-3'-phosphate
  modified_base 6: mod_base = OTHER; note = 2'-O-hexadecyl-guanosine-3'-phosphate
  modified_base 7: mod_base = OTHER; note = 2'-deoxy-2'-fluorouridine-3'-phosphate
  modified_base 8: mod_base = OTHER; note = 2'-O-methyluridine-3'-phosphate
  modified_base 9: mod_base = OTHER; note = 2'-deoxy-2'-fluorocytidine-3'-phosphate
  modified_base 10: mod_base = OTHER; note = 2'-deoxy-2'-fluorouridine-3'-phosphate
  modified_base 11: mod_base = OTHER; note = 2'-deoxy-2'-fluorocytidine-3'-phosphate
  modified_base 12: mod_base = OTHER; note = 2'-O-methylcytidine-3'-phosphate
  modified_base 13: mod_base = OTHER; note = 2'-O-methyluridine-3'-phosphate
  modified_base 14: mod_base = OTHER; note = 2'-O-methyluridine-3'-phosphate
  modified_base 15: mod_base = OTHER; note = 2'-O-methylcytidine-3'-phosphate
  modified_base 16: mod_base = OTHER; note = 2'-O-methylguanosine-3'-phosphate
  modified_base 17: mod_base = OTHER; note = 2'-O-methylguanosine-3'-phosphate
  modified_base 18: mod_base = OTHER; note = 2'-O-methylcytidine-3'-phosphate
  modified_base 19: mod_base = OTHER; note = 2'-O-methyluridine-3'-phosphorothioate
  modified_base 20: mod_base = OTHER; note = 2'-O-methylcytidine-3'-phosphorothioate
  modified_base 21: mod_base = OTHER; note = 2'-O-methyladenosine
cccgagttctccttcggctca

SEQ ID NO: 386 - RNA, 21 nt, synthetic construct
  source 1..21: mol_type = other RNA
  modified_base 1: mod_base = OTHER; note = 2'-O-methylguanosine-3'-phosphorothioate
  modified_base 2: mod_base = OTHER; note = 2'-O-methylguanosine-3'-phosphorothioate
  modified_base 3: mod_base = OTHER; note = 2'-O-methylcytidine-3'-phosphate
  modified_base 4: mod_base = OTHER; note = 2'-O-methylguanosine-3'-phosphate
  modified_base 5: mod_base = OTHER; note = 2'-O-methyluridine-3'-phosphate
  modified_base 6: mod_base = OTHER; note = 2'-O-hexadecyl-guanosine-3'-phosphate
  modified_base 7: mod_base = OTHER; note = 2'-deoxy-2'-fluorocytidine-3'-phosphate
  modified_base 8: mod_base = OTHER; note = 2'-O-methylcytidine-3'-phosphate
  modified_base 9: mod_base = OTHER; note = 2'-deoxy-2'-fluorocytidine-3'-phosphate
  modified_base 10: mod_base = OTHER; note = 2'-deoxy-2'-fluoroadenosine-3'-phosphate
  modified_base 11: mod_base = OTHER; note = 2'-deoxy-2'-fluoroguanosine-3'-phosphate
  modified_base 12: mod_base = OTHER; note = 2'-O-methylcytidine-3'-phosphate
  modified_base 13: mod_base = OTHER; note = 2'-O-methyluridine-3'-phosphate
  modified_base 14: mod_base = OTHER; note = 2'-O-methyluridine-3'-phosphate
  modified_base 15: mod_base = OTHER; note = 2'-O-methyluridine-3'-phosphate
  modified_base 16: mod_base = OTHER; note = 2'-O-methylcytidine-3'-phosphate
  modified_base 17: mod_base = OTHER; note = 2'-O-methylcytidine-3'-phosphate
  modified_base 18: mod_base = OTHER; note = 2'-O-methyluridine-3'-phosphate
  modified_base 19: mod_base = OTHER; note = 2'-O-methylcytidine-3'-phosphorothioate
  modified_base 20: mod_base = OTHER; note = 2'-O-methyluridine-3'-phosphorothioate
  modified_base 21: mod_base = OTHER; note = 2'-O-methyladenosine
ggcgtgcccagctttcctcta

SEQ ID NO: 387 - RNA, 21 nt, synthetic construct
  source 1..21: mol_type = other RNA
  modified_base 1: mod_base = OTHER; note = 2'-O-methyluridine-3'-phosphorothioate
  modified_base 2: mod_base = OTHER; note = 2'-O-methyluridine-3'-phosphorothioate
  modified_base 3: mod_base = OTHER; note = 2'-O-methyluridine-3'-phosphate
  modified_base 4: mod_base = OTHER; note = 2'-O-methylcytidine-3'-phosphate
  modified_base 5: mod_base = OTHER; note = 2'-O-methylcytidine-3'-phosphate
  modified_base 6: mod_base = OTHER; note = 2'-O-hexadecyl-uridine-3'-phosphate
  modified_base 7: mod_base = OTHER; note = 2'-deoxy-2'-fluorocytidine-3'-phosphate
  modified_base 8: mod_base = OTHER; note = 2'-O-methyluridine-3'-phosphate
  modified_base 9: mod_base = OTHER; note = 2'-deoxy-2'-fluoroguanosine-3'-phosphate
  modified_base 10: mod_base = OTHER; note = 2'-deoxy-2'-fluorocytidine-3'-phosphate
  modified_base 11: mod_base = OTHER; note = 2'-deoxy-2'-fluoroguanosine-3'-phosphate
  modified_base 12: mod_base = OTHER; note = 2'-O-methylguanosine-3'-phosphate
  modified_base 13: mod_base = OTHER; note = 2'-O-methylcytidine-3'-phosphate
  modified_base 14: mod_base = OTHER; note = 2'-O-methylguanosine-3'-phosphate
  modified_base 15: mod_base = OTHER; note = 2'-O-methyluridine-3'-phosphate
  modified_base 16: mod_base = OTHER; note = 2'-O-methylguanosine-3'-phosphate
  modified_base 17: mod_base = OTHER; note = 2'-O-methylcytidine-3'-phosphate
  modified_base 18: mod_base = OTHER; note = 2'-O-methyladenosine-3'-phosphate
  modified_base 19: mod_base = OTHER; note = 2'-O-methylcytidine-3'-phosphorothioate
  modified_base 20: mod_base = OTHER; note = 2'-O-methyluridine-3'-phosphorothioate
  modified_base 21: mod_base = OTHER; note = 2'-O-methyladenosine
tttcctctgcggcgtgcacta

SEQ ID NO: 388 - RNA, 21 nt, synthetic construct
  source 1..21: mol_type = other RNA
  modified_base 1: mod_base = OTHER; note = 2'-O-methylcytidine-3'-phosphorothioate
  modified_base 2: mod_base = OTHER; note = 2'-O-methylguanosine-3'-phosphorothioate
  modified_base 3: mod_base = OTHER; note = 2'-O-methylguanosine-3'-phosphate
  modified_base 4: mod_base = OTHER; note = 2'-O-methylcytidine-3'-phosphate
  modified_base 5: mod_base = OTHER; note = 2'-O-methylguanosine-3'-phosphate
  modified_base 6: mod_base = OTHER; note = 2'-O-hexadecyl-uridine-3'-phosphate
  modified_base 7: mod_base = OTHER; note = 2'-deoxy-2'-fluoroguanosine-3'-phosphate
  modified_base 8: mod_base = OTHER; note = 2'-O-methylcytidine-3'-phosphate
  modified_base 9: mod_base = OTHER; note = 2'-deoxy-2'-fluoroadenosine-3'-phosphate
  modified_base 10: mod_base = OTHER; note = 2'-deoxy-2'-fluorocytidine-3'-phosphate
  modified_base 11: mod_base = OTHER; note = 2'-deoxy-2'-fluorouridine-3'-phosphate
  modified_base 12: mod_base = OTHER; note = 2'-O-methyladenosine-3'-phosphate
  modified_base 13: mod_base = OTHER; note = 2'-O-methylcytidine-3'-phosphate
  modified_base 14: mod_base = OTHER; note = 2'-O-methylcytidine-3'-phosphate
  modified_base 15: mod_base = OTHER; note = 2'-O-methyluridine-3'-phosphate
  modified_base 16: mod_base = OTHER; note = 2'-O-methylcytidine-3'-phosphate
  modified_base 17: mod_base = OTHER; note = 2'-O-methyluridine-3'-phosphate
  modified_base 18: mod_base = OTHER; note = 2'-O-methyladenosine-3'-phosphate
  modified_base 19: mod_base = OTHER; note = 2'-O-methylcytidine-3'-phosphorothioate
  modified_base 20: mod_base = OTHER; note = 2'-O-methyluridine-3'-phosphorothioate
  modified_base 21: mod_base = OTHER; note = 2'-O-methyladenosine
cggcgtgcactacctctacta

SEQ ID NO: 389 - RNA, 21 nt, synthetic construct
  source 1..21: mol_type = other RNA
  modified_base 1: mod_base = OTHER; note = 2'-O-methylcytidine-3'-phosphorothioate
  modified_base 2: mod_base = OTHER; note = 2'-O-methyluridine-3'-phosphorothioate
  modified_base 3: mod_base = OTHER; note = 2'-O-methyladenosine-3'-phosphate
  modified_base 4: mod_base = OTHER; note = 2'-O-methylcytidine-3'-phosphate
  modified_base 5: mod_base = OTHER; note = 2'-O-methylcytidine-3'-phosphate
  modified_base 6: mod_base = OTHER; note = 2'-O-hexadecyl-uridine-3'-phosphate
  modified_base 7: mod_base = OTHER; note = 2'-deoxy-2'-fluorocytidine-3'-phosphate
  modified_base 8: mod_base = OTHER; note = 2'-O-methyluridine-3'-phosphate
  modified_base 9: mod_base = OTHER; note = 2'-deoxy-2'-fluoroadenosine-3'-phosphate
  modified_base 10: mod_base = OTHER; note = 2'-deoxy-2'-fluorocytidine-3'-phosphate
  modified_base 11: mod_base = OTHER; note = 2'-deoxy-2'-fluorouridine-3'-phosphate
  modified_base 12: mod_base = OTHER; note = 2'-O-methyluridine-3'-phosphate
  modified_base 13: mod_base = OTHER; note = 2'-O-methylcytidine-3'-phosphate
  modified_base 14: mod_base = OTHER; note = 2'-O-methylguanosine-3'-phosphate
  modified_base 15: mod_base = OTHER; note = 2'-O-methylcytidine-3'-phosphate
  modified_base 16: mod_base = OTHER; note = 2'-O-methylcytidine-3'-phosphate
  modified_base 17: mod_base = OTHER; note = 2'-O-methyladenosine-3'-phosphate
  modified_base 18: mod_base = OTHER; note = 2'-O-methyluridine-3'-phosphate
  modified_base 19: mod_base = OTHER; note = 2'-O-methyluridine-3'-phosphorothioate
  modified_base 20: mod_base = OTHER; note = 2'-O-methylguanosine-3'-phosphorothioate
  modified_base 21: mod_base = OTHER; note = 2'-O-methyladenosine
ctacctctacttcgccattga

SEQ ID NO: 390 - RNA, 21 nt, synthetic construct
  source 1..21: mol_type = other RNA
  modified_base 1: mod_base = OTHER; note = 2'-O-methylguanosine-3'-phosphorothioate
  modified_base 2: mod_base = OTHER; note = 2'-O-methylcytidine-3'-phosphorothioate
  modified_base 3: mod_base = OTHER; note = 2'-O-methylcytidine-3'-phosphate
  modified_base 4: mod_base = OTHER; note = 2'-O-methyladenosine-3'-phosphate
  modified_base 5: mod_base = OTHER; note = 2'-O-methyluridine-3'-phosphate
  modified_base 6: mod_base = OTHER; note = 2'-O-hexadecyl-uridine-3'-phosphate
  modified_base 7: mod_base = OTHER; note = 2'-deoxy-2'-fluoroguanosine-3'-phosphate
  modified_base 8: mod_base = OTHER; note = 2'-O-methyluridine-3'-phosphate
  modified_base 9: mod_base = OTHER; note = 2'-deoxy-2'-fluoroguanosine-3'-phosphate
  modified_base 10: mod_base = OTHER; note = 2'-deoxy-2'-fluorocytidine-3'-phosphate
  modified_base 11: mod_base = OTHER; note = 2'-deoxy-2'-fluorouridine-3'-phosphate
  modified_base 12: mod_base = OTHER; note = 2'-O-methylguanosine-3'-phosphate
  modified_base 13: mod_base = OTHER; note = 2'-O-methyluridine-3'-phosphate
  modified_base 14: mod_base = OTHER; note = 2'-O-methyluridine-3'-phosphate
  modified_base 15: mod_base = OTHER; note = 2'-O-methylcytidine-3'-phosphate
  modified_base 16: mod_base = OTHER; note = 2'-O-methyluridine-3'-phosphate
  modified_base 17: mod_base = OTHER; note = 2'-O-methyluridine-3'-phosphate
  modified_base 18: mod_base = OTHER; note = 2'-O-methylcytidine-3'-phosphate
  modified_base 19: mod_base = OTHER; note = 2'-O-methyluridine-3'-phosphorothioate
  modified_base 20: mod_base = OTHER; note = 2'-O-methylguanosine-3'-phosphorothioate
  modified_base 21: mod_base = OTHER; note = 2'-O-methyladenosine
gccattgtgctgttcttctga

SEQ ID NO: 391 - RNA, 21 nt, synthetic construct
  source 1..21: mol_type = other RNA
  modified_base 1: mod_base = OTHER; note = 2'-O-methylcytidine-3'-phosphorothioate
  modified_base 2: mod_base = OTHER; note = 2'-O-methyluridine-3'-phosphorothioate
  modified_base 3: mod_base = OTHER; note = 2'-O-methylguanosine-3'-phosphate
  modified_base 4: mod_base = OTHER; note = 2'-O-methyluridine-3'-phosphate
  modified_base 5: mod_base = OTHER; note = 2'-O-methyluridine-3'-phosphate
  modified_base 6: mod_base = OTHER; note = 2'-O-hexadecyl-cytidine-3'-phosphate
  modified_base 7: mod_base = OTHER; note = 2'-deoxy-2'-fluorouridine-3'-phosphate
  modified_base 8: mod_base = OTHER; note = 2'-O-methyluridine-3'-phosphate
  modified_base 9: mod_base = OTHER; note = 2'-deoxy-2'-fluorocytidine-3'-phosphate
  modified_base 10: mod_base = OTHER; note = 2'-deoxy-2'-fluorouridine-3'-phosphate
  modified_base 11: mod_base = OTHER; note = 2'-deoxy-2'-fluoroguanosine-3'-phosphate
  modified_base 12: mod_base = OTHER; note = 2'-O-methylcytidine-3'-phosphate
  modified_base 13: mod_base = OTHER; note = 2'-O-methyluridine-3'-phosphate
  modified_base 14: mod_base = OTHER; note = 2'-O-methylcytidine-3'-phosphate
  modified_base 15: mod_base = OTHER; note = 2'-O-methyluridine-3'-phosphate
  modified_base 16: mod_base = OTHER; note = 2'-O-methylguanosine-3'-phosphate
  modified_base 17: mod_base = OTHER; note = 2'-O-methylguanosine-3'-phosphate
  modified_base 18: mod_base = OTHER; note = 2'-O-methylcytidine-3'-phosphate
  modified_base 19: mod_base = OTHER; note = 2'-O-methylcytidine-3'-phosphorothioate
  modified_base 20: mod_base = OTHER; note = 2'-O-methyluridine-3'-phosphorothioate
  modified_base 21: mod_base = OTHER; note = 2'-O-methyladenosine
ctgttcttctgctctggccta

SEQ ID NO: 392 - RNA, 21 nt, synthetic construct
  source 1..21: mol_type = other RNA
  modified_base 1: mod_base = OTHER; note = 2'-O-methylcytidine-3'-phosphorothioate
  modified_base 2: mod_base = OTHER; note = 2'-O-methyluridine-3'-phosphorothioate
  modified_base 3: mod_base = OTHER; note = 2'-O-methylcytidine-3'-phosphate
  modified_base 4: mod_base = OTHER; note = 2'-O-methyluridine-3'-phosphate
  modified_base 5: mod_base = OTHER; note = 2'-O-methylguanosine-3'-phosphate
  modified_base 6: mod_base = OTHER; note = 2'-O-hexadecyl-guanosine-3'-phosphate
  modified_base 7: mod_base = OTHER; note = 2'-deoxy-2'-fluorocytidine-3'-phosphate
  modified_base 8: mod_base = OTHER; note = 2'-O-methylcytidine-3'-phosphate
  modified_base 9: mod_base = OTHER; note = 2'-deoxy-2'-fluorouridine-3'-phosphate
  modified_base 10: mod_base = OTHER; note = 2'-deoxy-2'-fluorocytidine-3'-phosphate
  modified_base 11: mod_base = OTHER; note = 2'-deoxy-2'-fluorocytidine-3'-phosphate
  modified_base 12: mod_base = OTHER; note = 2'-O-methyluridine-3'-phosphate
  modified_base 13: mod_base = OTHER; note = 2'-O-methylcytidine-3'-phosphate
  modified_base 14: mod_base = OTHER; note = 2'-O-methyladenosine-3'-phosphate
  modified_base 15: mod_base = OTHER; note = 2'-O-methylcytidine-3'-phosphate
  modified_base 16: mod_base = OTHER; note = 2'-O-methylcytidine-3'-phosphate
  modified_base 17: mod_base = OTHER; note = 2'-O-methylcytidine-3'-phosphate
  modified_base 18: mod_base = OTHER; note = 2'-O-methyluridine-3'-phosphate
  modified_base 19: mod_base = OTHER; note = 2'-O-methylcytidine-3'-phosphorothioate
  modified_base 20: mod_base = OTHER; note = 2'-O-methyladenosine-3'-phosphorothioate
  modified_base 21: mod_base = OTHER; note = 2'-O-methyladenosine
ctctggcctcctcaccctcaa

SEQ ID NO: 393 - RNA, 21 nt, synthetic construct
  source 1..21: mol_type = other RNA
  modified_base 1: mod_base = OTHER; note = 2'-O-methylcytidine-3'-phosphorothioate
  modified_base 2: mod_base = OTHER; note = 2'-O-methyluridine-3'-phosphorothioate
  modified_base 3: mod_base = OTHER; note = 2'-O-methylcytidine-3'-phosphate
  modified_base 4: mod_base = OTHER; note = 2'-O-methyladenosine-3'-phosphate
  modified_base 5: mod_base = OTHER; note = 2'-O-methylcytidine-3'-phosphate
  modified_base 6: mod_base = OTHER; note = 2'-O-hexadecyl-cytidine-3'-phosphate
  modified_base 7: mod_base = OTHER; note = 2'-deoxy-2'-fluorocytidine-3'-phosphate
  modified_base 8: mod_base = OTHER; note = 2'-O-methyluridine-3'-phosphate
  modified_base 9: mod_base = OTHER; note = 2'-deoxy-2'-fluorocytidine-3'-phosphate
  modified_base 10: mod_base = OTHER; note = 2'-deoxy-2'-fluoroadenosine-3'-phosphate
  modified_base 11: mod_base = OTHER; note = 2'-deoxy-2'-fluorocytidine-3'-phosphate
  modified_base 12: mod_base = OTHER; note = 2'-O-methylguanosine-3'-phosphate
  modified_base 13: mod_base = OTHER; note = 2'-O-methylguanosine-3'-phosphate
  modified_base 14: mod_base = OTHER; note = 2'-O-methyluridine-3'-phosphate
  modified_base 15: mod_base = OTHER; note = 2'-O-methylcytidine-3'-phosphate
  modified_base 16: mod_base = OTHER; note = 2'-O-methyluridine-3'-phosphate
  modified_base 17: mod_base = OTHER; note = 2'-O-methylcytidine-3'-phosphate
  modified_base 18: mod_base = OTHER; note = 2'-O-methylcytidine-3'-phosphate
  modified_base 19: mod_base = OTHER; note = 2'-O-methylcytidine-3'-phosphorothioate
  modified_base 20: mod_base = OTHER; note = 2'-O-methyluridine-3'-phosphorothioate
  modified_base 21: mod_base = OTHER; note = 2'-O-methyladenosine
ctcaccctcacggtctcccta

SEQ ID NO: 394 - RNA, 21 nt, synthetic construct
  source 1..21: mol_type = other RNA
  modified_base 1: mod_base = OTHER; note = 2'-O-methylcytidine-3'-phosphorothioate
  modified_base 2: mod_base = OTHER; note = 2'-O-methyladenosine-3'-phosphorothioate
  modified_base 3: mod_base = OTHER; note = 2'-O-methylcytidine-3'-phosphate
  modified_base 4: mod_base = OTHER; note = 2'-O-methylcytidine-3'-phosphate
  modified_base 5: mod_base = OTHER; note = 2'-O-methyluridine-3'-phosphate
  modified_base 6: mod_base = OTHER; note = 2'-O-hexadecyl-cytidine-3'-phosphate
  modified_base 7: mod_base = OTHER; note = 2'-deoxy-2'-fluorocytidine-3'-phosphate
  modified_base 8: mod_base = OTHER; note = 2'-O-methyladenosine-3'-phosphate
  modified_base 9: mod_base = OTHER; note = 2'-deoxy-2'-fluorocytidine-3'-phosphate
  modified_base 10: mod_base = OTHER; note = 2'-deoxy-2'-fluorocytidine-3'-phosphate
  modified_base 11: mod_base = OTHER; note = 2'-deoxy-2'-fluoroguanosine-3'-phosphate
  modified_base 12: mod_base = OTHER; note = 2'-O-methylcytidine-3'-phosphate
  modified_base 13: mod_base = OTHER; note = 2'-O-methylcytidine-3'-phosphate
  modified_base 14: mod_base = OTHER; note = 2'-O-methyluridine-3'-phosphate
  modified_base 15: mod_base = OTHER; note = 2'-O-methylguanosine-3'-phosphate
  modified_base 16: mod_base = OTHER; note = 2'-O-methylguanosine-3'-phosphate
  modified_base 17: mod_base = OTHER; note = 2'-O-methyluridine-3'-phosphate
  modified_base 18: mod_base = OTHER; note = 2'-O-methylcytidine-3'-phosphate
  modified_base 19: mod_base = OTHER; note = 2'-O-methyluridine-3'-phosphorothioate
  modified_base 20: mod_base = OTHER; note = 2'-O-methyluridine-3'-phosphorothioate
  modified_base 21: mod_base = OTHER; note = 2'-O-methyladenosine
cacctccaccgcctggtctta

SEQ ID NO: 395 - RNA, 21 nt, synthetic construct
  source 1..21: mol_type = other RNA
  modified_base 1: mod_base = OTHER; note = 2'-O-methylcytidine-3'-phosphorothioate
  modified_base 2: mod_base = OTHER; note = 2'-O-methylguanosine-3'-phosphorothioate
  modified_base 3: mod_base = OTHER; note = 2'-O-methylcytidine-3'-phosphate
  modified_base 4: mod_base = OTHER; note = 2'-O-methylcytidine-3'-phosphate
  modified_base 5: mod_base = OTHER; note = 2'-O-methyluridine-3'-phosphate
  modified_base 6: mod_base = OTHER; note = 2'-O-hexadecyl-guanosine-3'-phosphate
  modified_base 7: mod_base = OTHER; note = 2'-deoxy-2'-fluoroguanosine-3'-phosphate
  modified_base 8: mod_base = OTHER; note = 2'-O-methyluridine-3'-phosphate
  modified_base 9: mod_base = OTHER; note = 2'-deoxy-2'-fluorocytidine-3'-phosphate
  modified_base 10: mod_base = OTHER; note = 2'-deoxy-2'-fluorouridine-3'-phosphate
  modified_base 11: mod_base = OTHER; note = 2'-deoxy-2'-fluorouridine-3'-phosphate
  modified_base 12: mod_base = OTHER; note = 2'-O-methylcytidine-3'-phosphate
  modified_base 13: mod_base = OTHER; note = 2'-O-methyladenosine-3'-phosphate
  modified_base 14: mod_base = OTHER; note = 2'-O-methylguanosine-3'-phosphate
  modified_base 15: mod_base = OTHER; note = 2'-O-methyluridine-3'-phosphate
  modified_base 16: mod_base = OTHER; note = 2'-O-methylcytidine-3'-phosphate
  modified_base 17: mod_base = OTHER; note = 2'-O-methyluridine-3'-phosphate
  modified_base 18: mod_base = OTHER; note = 2'-O-methylcytidine-3'-phosphate
  modified_base 19: mod_base = OTHER; note = 2'-O-methylcytidine-3'-phosphorothioate
  modified_base 20: mod_base = OTHER; note = 2'-O-methylguanosine-3'-phosphorothioate
  modified_base 21: mod_base = OTHER; note = 2'-O-methyladenosine
cgcctggtcttcagtctccga

SEQ ID NO: 396 - RNA, 21 nt, synthetic construct
  source 1..21: mol_type = other RNA
  modified_base 1: mod_base = OTHER; note = 2'-O-methyluridine-3'-phosphorothioate
  modified_base 2: mod_base = OTHER; note = 2'-O-methylcytidine-3'-phosphorothioate
  modified_base 3: mod_base = OTHER; note = 2'-O-methylcytidine-3'-phosphate
  modified_base 4: mod_base = OTHER; note = 2'-O-methylguanosine-3'-phosphate
  modified_base 5: mod_base = OTHER; note = 2'-O-methylguanosine-3'-phosphate
  modified_base 6: mod_base = OTHER; note = 2'-O-hexadecyl-cytidine-3'-phosphate
  modified_base 7: mod_base = OTHER; note = 2'-deoxy-2'-fluoroadenosine-3'-phosphate
  modified_base 8: mod_base = OTHER; note = 2'-O-methyluridine-3'-phosphate
  modified_base 9: mod_base = OTHER; note = 2'-deoxy-2'-fluoroadenosine-3'-phosphate
  modified_base 10: mod_base = OTHER; note = 2'-deoxy-2'-fluoroguanosine-3'-phosphate
  modified_base 11: mod_base = OTHER; note = 2'-deoxy-2'-fluorocytidine-3'-phosphate
  modified_base 12: mod_base = OTHER; note = 2'-O-methyladenosine-3'-phosphate
  modified_base 13: mod_base = OTHER; note = 2'-O-methyladenosine-3'-phosphate
  modified_base 14: mod_base = OTHER; note = 2'-O-methylguanosine-3'-phosphate
  modified_base 15: mod_base = OTHER; note = 2'-O-methylguanosine-3'-phosphate
  modified_base 16: mod_base = OTHER; note = 2'-O-methyladenosine-3'-phosphate
  modified_base 17: mod_base = OTHER; note = 2'-O-methylguanosine-3'-phosphate
  modified_base 18: mod_base = OTHER; note = 2'-O-methylguanosine-3'-phosphate
  modified_base 19: mod_base = OTHER; note = 2'-O-methyladenosine-3'-phosphorothioate
  modified_base 20: mod_base = OTHER; note = 2'-O-methyladenosine-3'-phosphorothioate
  modified_base 21: mod_base = OTHER; note = 2'-O-methyladenosine
tccggcatagcaaggaggaaa

SEQ ID NO: 397 - RNA, 21 nt, synthetic construct
  source 1..21: mol_type = other RNA
  modified_base 1: mod_base = OTHER; note = 2'-O-methyladenosine-3'-phosphorothioate
  modified_base 2: mod_base = OTHER; note = 2'-O-methyladenosine-3'-phosphorothioate
  modified_base 3: mod_base = OTHER; note = 2'-O-methylguanosine-3'-phosphate
  modified_base 4: mod_base = OTHER; note = 2'-O-methylguanosine-3'-phosphate
  modified_base 5: mod_base = OTHER; note = 2'-O-methyladenosine-3'-phosphate
  modified_base 6: mod_base = OTHER; note = 2'-O-hexadecyl-guanosine-3'-phosphate
  modified_base 7: mod_base = OTHER; note = 2'-deoxy-2'-fluoroguanosine-3'-phosphate
  modified_base 8: mod_base = OTHER; note = 2'-O-methyladenosine-3'-phosphate
  modified_base 9: mod_base = OTHER; note = 2'-deoxy-2'-fluoroadenosine-3'-phosphate
  modified_base 10: mod_base = OTHER; note = 2'-deoxy-2'-fluorocytidine-3'-phosphate
  modified_base 11: mod_base = OTHER; note = 2'-deoxy-2'-fluoroguanosine-3'-phosphate
  modified_base 12: mod_base = OTHER; note = 2'-O-methylguanosine-3'-phosphate
  modified_base 13: mod_base = OTHER; note = 2'-O-methylguanosine-3'-phosphate
  modified_base 14: mod_base = OTHER; note = 2'-O-methyladenosine-3'-phosphate
  modified_base 15: mod_base = OTHER; note = 2'-O-methylguanosine-3'-phosphate
  modified_base 16: mod_base = OTHER; note = 2'-O-methylguanosine-3'-phosphate
  modified_base 17: mod_base = OTHER; note = 2'-O-methyladenosine-3'-phosphate
  modified_base 18: mod_base = OTHER; note = 2'-O-methylcytidine-3'-phosphate
  modified_base 19: mod_base = OTHER; note = 2'-O-methylcytidine-3'-phosphorothioate
  modified_base 20: mod_base = OTHER; note = 2'-O-methyluridine-3'-phosphorothioate
  modified_base 21: mod_base = OTHER; note = 2'-O-methyladenosine
aaggaggaacgggaggaccta

SEQ ID NO: 398 - RNA, 21 nt, synthetic construct
  source 1..21: mol_type = other RNA
  modified_base 1: mod_base = OTHER; note = 2'-O-methylcytidine-3'-phosphorothioate
  modified_base 2: mod_base = OTHER; note = 2'-O-methylguanosine-3'-phosphorothioate
  modified_base 3: mod_base = OTHER; note = 2'-O-methylguanosine-3'-phosphate
  modified_base 4: mod_base = OTHER; note = 2'-O-methylguanosine-3'-phosphate
  modified_base 5: mod_base = OTHER; note = 2'-O-methyladenosine-3'-phosphate
  modified_base 6: mod_base = OTHER; note = 2'-O-hexadecyl-guanosine-3'-phosphate
  modified_base 7: mod_base = OTHER; note = 2'-deoxy-2'-fluoroguanosine-3'-phosphate
  modified_base 8: mod_base = OTHER; note = 2'-O-methyladenosine-3'-phosphate
  modified_base 9: mod_base = OTHER; note = 2'-deoxy-2'-fluorocytidine-3'-phosphate
  modified_base 10: mod_base = OTHER; note = 2'-deoxy-2'-fluorocytidine-3'-phosphate
  modified_base 11: mod_base = OTHER; note = 2'-deoxy-2'-fluorouridine-3'-phosphate
  modified_base 12: mod_base = OTHER; note = 2'-O-methylguanosine-3'-phosphate
  modified_base 13: mod_base = OTHER; note = 2'-O-methylguanosine-3'-phosphate
  modified_base 14: mod_base = OTHER; note = 2'-O-methyladenosine-3'-phosphate
  modified_base 15: mod_base = OTHER; note = 2'-O-methyluridine-3'-phosphate
  modified_base 16: mod_base = OTHER; note = 2'-O-methylguanosine-3'-phosphate
  modified_base 17: mod_base = OTHER; note = 2'-O-methylcytidine-3'-phosphate
  modified_base 18: mod_base = OTHER; note = 2'-O-methyluridine-3'-phosphate
  modified_base 19: mod_base = OTHER; note = 2'-O-methylguanosine-3'-phosphorothioate
  modified_base 20: mod_base = OTHER; note = 2'-O-methyladenosine-3'-phosphorothioate
  modified_base 21: mod_base = OTHER; note = 2'-O-methyladenosine
cgggaggacctggatgctgaa

SEQ ID NO: 399 - RNA, 21 nt, synthetic construct
  source 1..21: mol_type = other RNA
  modified_base 1: mod_base = OTHER; note = 2'-O-methylcytidine-3'-phosphorothioate
  modified_base 2: mod_base = OTHER; note = 2'-O-methyluridine-3'-phosphorothioate
  modified_base 3: mod_base = OTHER; note = 2'-O-methylguanosine-3'-phosphate
  modified_base 4: mod_base = OTHER; note = 2'-O-methylguanosine-3'-phosphate
  modified_base 5: mod_base = OTHER; note = 2'-O-methyladenosine-3'-phosphate
  modified_base 6: mod_base = OTHER; note = 2'-O-hexadecyl-uridine-3'-phosphate
  modified_base 7: mod_base = OTHER; note = 2'-deoxy-2'-fluoroguanosine-3'-phosphate
  modified_base 8: mod_base = OTHER; note = 2'-O-methylcytidine-3'-phosphate
  modified_base 9: mod_base = OTHER; note = 2'-deoxy-2'-fluorouridine-3'-phosphate
  modified_base 10: mod_base = OTHER; note = 2'-deoxy-2'-fluoroguanosine-3'-phosphate
  modified_base 11: mod_base = OTHER; note = 2'-deoxy-2'-fluoroadenosine-3'-phosphate
  modified_base 12: mod_base = OTHER; note = 2'-O-methyluridine-3'-phosphate
  modified_base 13: mod_base = OTHER; note = 2'-O-methylguanosine-3'-phosphate
  modified_base 14: mod_base = OTHER; note = 2'-O-methyladenosine-3'-phosphate
  modified_base 15: mod_base = OTHER; note = 2'-O-methylguanosine-3'-phosphate
  modified_base 16: mod_base = OTHER; note = 2'-O-methylcytidine-3'-phosphate
  modified_base 17: mod_base = OTHER; note = 2'-O-methyladenosine-3'-phosphate
  modified_base 18: mod_base = OTHER; note = 2'-O-methylguanosine-3'-phosphate
  modified_base 19: mod_base = OTHER; note = 2'-O-methylcytidine-3'-phosphorothioate
  modified_base 20: mod_base = OTHER; note = 2'-O-methyladenosine-3'-phosphorothioate
  modified_base 21: mod_base = OTHER; note = 2'-O-methyladenosine
ctggatgctgatgagcagcaa

SEQ ID NO: 400 - RNA, 21 nt, synthetic construct
  source 1..21: mol_type = other RNA
  modified_base 1: mod_base = OTHER; note = 2'-O-methylguanosine-3'-phosphorothioate
  modified_base 2: mod_base = OTHER; note = 2'-O-methyladenosine-3'-phosphorothioate
  modified_base 3: mod_base = OTHER; note = 2'-O-methyluridine-3'-phosphate
  modified_base 4: mod_base = OTHER; note = 2'-O-methylguanosine-3'-phosphate
  modified_base 5: mod_base = OTHER; note = 2'-O-methyladenosine-3'-phosphate
  modified_base 6: mod_base = OTHER; note = 2'-O-hexadecyl-guanosine-3'-phosphate
  modified_base 7: mod_base = OTHER; note = 2'-deoxy-2'-fluorocytidine-3'-phosphate
  modified_base 8: mod_base = OTHER; note = 2'-O-methyladenosine-3'-phosphate
  modified_base 9: mod_base = OTHER; note = 2'-deoxy-2'-fluoroguanosine-3'-phosphate
  modified_base 10: mod_base = OTHER; note = 2'-deoxy-2'-fluorocytidine-3'-phosphate
  modified_base 11: mod_base = OTHER; note = 2'-deoxy-2'-fluoroadenosine-3'-phosphate
  modified_base 12: mod_base = OTHER; note = 2'-O-methyladenosine-3'-phosphate
  modified_base 13: mod_base = OTHER; note = 2'-O-methylguanosine-3'-phosphate
  modified_base 14: mod_base = OTHER; note = 2'-O-methylguanosine-3'-phosphate
  modified_base 15: mod_base = OTHER; note = 2'-O-methylcytidine-3'-phosphate
  modified_base 16: mod_base = OTHER; note = 2'-O-methyluridine-3'-phosphate
  modified_base 17: mod_base = OTHER; note = 2'-O-methylcytidine-3'-phosphate
  modified_base 18: mod_base = OTHER; note = 2'-O-methylcytidine-3'-phosphate
  modified_base 19: mod_base = OTHER; note = 2'-O-methyluridine-3'-phosphorothioate
  modified_base 20: mod_base = OTHER; note = 2'-O-methylcytidine-3'-phosphorothioate
  modified_base 21: mod_base = OTHER; note = 2'-O-methyladenosine
gatgagcagcaaggctcctca

SEQ ID NO: 401 - RNA, 21 nt, synthetic construct
  source 1..21: mol_type = other RNA
  modified_base 1: mod_base = OTHER; note = 2'-O-methylcytidine-3'-phosphorothioate
  modified_base 2: mod_base = OTHER; note = 2'-O-methyladenosine-3'-phosphorothioate
  modified_base 3: mod_base = OTHER; note = 2'-O-methyladenosine-3'-phosphate
  modified_base 4: mod_base = OTHER; note = 2'-O-methylguanosine-3'-phosphate
  modified_base 5: mod_base = OTHER; note = 2'-O-methylguanosine-3'-phosphate
  modified_base 6: mod_base = OTHER; note = 2'-O-hexadecyl-cytidine-3'-phosphate
  modified_base 7: mod_base = OTHER; note = 2'-deoxy-2'-fluorouridine-3'-phosphate
  modified_base 8: mod_base = OTHER; note = 2'-O-methylcytidine-3'-phosphate
  modified_base 9: mod_base = OTHER; note = 2'-deoxy-2'-fluorocytidine-3'-phosphate
  modified_base 10: mod_base = OTHER; note = 2'-deoxy-2'-fluorouridine-3'-phosphate
  modified_base 11: mod_base = OTHER; note = 2'-deoxy-2'-fluorocytidine-3'-phosphate
  modified_base 12: mod_base = OTHER; note = 2'-O-methyladenosine-3'-phosphate
  modified_base 13: mod_base = OTHER; note = 2'-O-methylcytidine-3'-phosphate
  modified_base 14: mod_base = OTHER; note = 2'-O-methyluridine-3'-phosphate
  modified_base 15: mod_base = OTHER; note = 2'-O-methylcytidine-3'-phosphate
  modified_base 16: mod_base = OTHER; note = 2'-O-methylcytidine-3'-phosphate
  modified_base 17: mod_base = OTHER; note = 2'-O-methylcytidine-3'-phosphate
  modified_base 18: mod_base = OTHER; note = 2'-O-methyluridine-3'-phosphate
  modified_base 19: mod_base = OTHER; note = 2'-O-methylguanosine-3'-phosphorothioate
  modified_base 20: mod_base = OTHER; note = 2'-O-methyluridine-3'-phosphorothioate
  modified_base 21: mod_base = OTHER; note = 2'-O-methyladenosine
caaggctcctcactccctgta

SEQ ID NO: 402 - RNA, 21 nt, synthetic construct
  source 1..21: mol_type = other RNA
  modified_base 1: mod_base = OTHER; note = 2'-O-methylcytidine-3'-phosphorothioate
  modified_base 2: mod_base = OTHER; note = 2'-O-methyluridine-3'-phosphorothioate
  modified_base 3: mod_base = OTHER; note = 2'-O-methylcytidine-3'-phosphate
  modified_base 4: mod_base = OTHER; note = 2'-O-methylcytidine-3'-phosphate
  modified_base 5: mod_base = OTHER; note = 2'-O-methylcytidine-3'-phosphate
  modified_base 6: mod_base = OTHER; note = 2'-O-hexadecyl-uridine-3'-phosphate
  modified_base 7: mod_base = OTHER; note = 2'-deoxy-2'-fluoroguanosine-3'-phosphate
  modified_base 8: mod_base = OTHER; note = 2'-O-methyluridine-3'-phosphate
  modified_base 9: mod_base = OTHER; note = 2'-deoxy-2'-fluoroadenosine-3'-phosphate
  modified_base 10: mod_base = OTHER; note = 2'-deoxy-2'-fluorocytidine-3'-phosphate
  modified_base 11: mod_base = OTHER; note = 2'-deoxy-2'-fluoroadenosine-3'-phosphate
  modified_base 12: mod_base = OTHER; note = 2'-O-methylguanosine-3'-phosphate
  modified_base 13: mod_base = OTHER; note = 2'-O-methyladenosine-3'-phosphate
  modified_base 14: mod_base = OTHER; note = 2'-O-methyladenosine-3'-phosphate
  modified_base 15: mod_base = OTHER; note = 2'-O-methyluridine-3'-phosphate
  modified_base 16: mod_base = OTHER; note = 2'-O-methylguanosine-3'-phosphate
  modified_base 17: mod_base = OTHER; note = 2'-O-methylguanosine-3'-phosphate
  modified_base 18: mod_base = OTHER; note = 2'-O-methylguanosine-3'-phosphate
  modified_base 19: mod_base = OTHER; note = 2'-O-methyluridine-3'-phosphorothioate
  modified_base 20: mod_base = OTHER; note = 2'-O-methylguanosine-3'-phosphorothioate
  modified_base 21: mod_base = OTHER; note = 2'-O-methyladenosine
ctccctgtacagaatgggtga

SEQ ID NO: 403 - RNA, 21 nt, synthetic construct
  source 1..21: mol_type = other RNA
  modified_base 1: mod_base = OTHER; note = 2'-O-methyluridine-3'-phosphorothioate
  modified_base 2: mod_base = OTHER; note = 2'-O-methylguanosine-3'-phosphorothioate
  modified_base 3: mod_base = OTHER; note = 2'-O-methylcytidine-3'-phosphate
  modified_base 4: mod_base = OTHER; note = 2'-O-methylcytidine-3'-phosphate
  modified_base 5: mod_base = OTHER; note = 2'-O-methylcytidine-3'-phosphate
  modified_base 6: mod_base = OTHER; note = 2'-O-hexadecyl-adenosine-3'-phosphate
  modified_base 7: mod_base = OTHER; note = 2'-deoxy-2'-fluoroguanosine-3'-phosphate
  modified_base 8: mod_base = OTHER; note = 2'-O-methyladenosine-3'-phosphate
  modified_base 9: mod_base = OTHER; note = 2'-deoxy-2'-fluoroguanosine-3'-phosphate
  modified_base 10: mod_base = OTHER; note = 2'-deoxy-2'-fluoroadenosine-3'-phosphate
  modified_base 11: mod_base = OTHER; note = 2'-deoxy-2'-fluoroguanosine-3'-phosphate
  modified_base 12: mod_base = OTHER; note = 2'-O-methyluridine-3'-phosphate
  modified_base 13: mod_base = OTHER; note = 2'-O-methylguanosine-3'-phosphate
  modified_base 14: mod_base = OTHER; note = 2'-O-methylcytidine-3'-phosphate
  modified_base 15: mod_base = OTHER; note = 2'-O-methylcytidine-3'-phosphate
  modified_base 16: mod_base = OTHER; note = 2'-O-methyladenosine-3'-phosphate
  modified_base 17: mod_base = OTHER; note = 2'-O-methyluridine-3'-phosphate
  modified_base 18: mod_base = OTHER; note = 2'-O-methylguanosine-3'-phosphate
  modified_base 19: mod_base = OTHER; note = 2'-O-methylguanosine-3'-phosphorothioate
  modified_base 20: mod_base = OTHER; note = 2'-O-methyladenosine-3'-phosphorothioate
  modified_base 21: mod_base = OTHER; note = 2'-O-methyladenosine
tgcccagagagtgccatggaa

SEQ ID NO: 404 - RNA, 21 nt, synthetic construct
  source 1..21: mol_type = other RNA
  modified_base 1: mod_base = OTHER; note = 2'-O-methylguanosine-3'-phosphorothioate
  modified_base 2: mod_base = OTHER; note = 2'-O-methylcytidine-3'-phosphorothioate
  modified_base 3: mod_base = OTHER; note = 2'-O-methylcytidine-3'-phosphate
  modified_base 4: mod_base = OTHER; note = 2'-O-methyladenosine-3'-phosphate
  modified_base 5: mod_base = OTHER; note = 2'-O-methyluridine-3'-phosphate
  modified_base 6: mod_base = OTHER; note = 2'-O-hexadecyl-guanosine-3'-phosphate
  modified_base 7: mod_base = OTHER; note = 2'-deoxy-2'-fluoroguanosine-3'-phosphate
  modified_base 8: mod_base = OTHER; note = 2'-O-methyladenosine-3'-phosphate
  modified_base 9: mod_base = OTHER; note = 2'-deoxy-2'-fluoroguanosine-3'-phosphate
  modified_base 10: mod_base = OTHER; note = 2'-deoxy-2'-fluoroadenosine-3'-phosphate
  modified_base 11: mod_base = OTHER; note = 2'-deoxy-2'-fluorouridine-3'-phosphate
  modified_base 12: mod_base = OTHER; note = 2'-O-methylguanosine-3'-phosphate
  modified_base 13: mod_base = OTHER; note = 2'-O-methyladenosine-3'-phosphate
  modified_base 14: mod_base = OTHER; note = 2'-O-methyladenosine-3'-phosphate
  modified_base 15: mod_base = OTHER; note = 2'-O-methyluridine-3'-phosphate
  modified_base 16: mod_base = OTHER; note = 2'-O-methylguanosine-3'-phosphate
  modified_base 17: mod_base = OTHER; note = 2'-O-methyladenosine-3'-phosphate
  modified_base 18: mod_base = OTHER; note = 2'-O-methylguanosine-3'-phosphate
  modified_base 19: mod_base = OTHER; note = 2'-O-methylcytidine-3'-phosphorothioate
  modified_base 20: mod_base = OTHER; note = 2'-O-methylcytidine-3'-phosphorothioate
  modified_base 21: mod_base = OTHER; note = 2'-O-methyladenosine
gccatggagatgaatgagcca

SEQ ID NO: 405 - RNA, 21 nt, synthetic construct
  source 1..21: mol_type = other RNA
  modified_base 1: mod_base = OTHER; note = 2'-O-methyladenosine-3'-phosphorothioate
  modified_base 2: mod_base = OTHER; note = 2'-O-methylcytidine-3'-phosphorothioate
  modified_base 3: mod_base = OTHER; note = 2'-O-methylcytidine-3'-phosphate
  modified_base 4: mod_base = OTHER; note = 2'-O-methyladenosine-3'-phosphate
  modified_base 5: mod_base = OTHER; note = 2'-O-methyladenosine-3'-phosphate
  modified_base 6: mod_base = OTHER; note = 2'-O-hexadecyl-guanosine-3'-phosphate
  modified_base 7: mod_base = OTHER; note = 2'-deoxy-2'-fluorocytidine-3'-phosphate
  modified_base 8: mod_base = OTHER; note = 2'-O-methylcytidine-3'-phosphate
  modified_base 9: mod_base = OTHER; note = 2'-deoxy-2'-fluorouridine-3'-phosphate
  modified_base 10: mod_base = OTHER; note = 2'-deoxy-2'-fluorocytidine-3'-phosphate
  modified_base 11: mod_base = OTHER; note = 2'-deoxy-2'-fluorouridine-3'-phosphate
  modified_base 12: mod_base = OTHER; note = 2'-O-methyluridine-3'-phosphate
  modified_base 13: mod_base = OTHER; note = 2'-O-methylcytidine-3'-phosphate
  modified_base 14: mod_base = OTHER; note = 2'-O-methylcytidine-3'-phosphate
  modified_base 15: mod_base = OTHER; note = 2'-O-methylguanosine-3'-phosphate
  modified_base 16: mod_base = OTHER; note = 2'-O-methylcytidine-3'-phosphate
  modified_base 17: mod_base = OTHER; note = 2'-O-methylcytidine-3'-phosphate
  modified_base 18: mod_base = OTHER; note = 2'-O-methyladenosine-3'-phosphate
  modified_base 19: mod_base = OTHER; note = 2'-O-methylguanosine-3'-phosphorothioate
  modified_base 20: mod_base = OTHER; note = 2'-O-methyluridine-3'-phosphorothioate
  modified_base 21: mod_base = OTHER; note = 2'-O-methyladenosine
accaagcctcttccgccagta

SEQ ID NO: 406 - RNA, 21 nt, synthetic construct
  source 1..21: mol_type = other RNA
  modified_base 1: mod_base = OTHER; note = 2'-O-methylcytidine-3'-phosphorothioate
  modified_base 2: mod_base = OTHER; note = 2'-O-methyladenosine-3'-phosphorothioate
  modified_base 3: mod_base = OTHER; note = 2'-O-methylguanosine-3'-phosphate
  modified_base 4: mod_base = OTHER; note = 2'-O-methyluridine-3'-phosphate
  modified_base 5: mod_base = OTHER; note = 2'-O-methylguanosine-3'-phosphate
  modified_base 6: mod_base = OTHER; note = 2'-O-hexadecyl-cytidine-3'-phosphate
  modified_base 7: mod_base = OTHER; note = 2'-deoxy-2'-fluorocytidine-3'-phosphate
  modified_base 8: mod_base = OTHER; note = 2'-O-methyluridine-3'-phosphate
  modified_base 9: mod_base = OTHER; note = 2'-deoxy-2'-fluoroguanosine-3'-phosphate
  modified_base 10: mod_base = OTHER; note = 2'-deoxy-2'-fluorocytidine-3'-phosphate
  modified_base 11: mod_base = OTHER; note = 2'-deoxy-2'-fluorouridine-3'-phosphate
  modified_base 12: mod_base = OTHER; note = 2'-O-methylcytidine-3'-phosphate
  modified_base 13: mod_base = OTHER; note = 2'-O-methyluridine-3'-phosphate
  modified_base 14: mod_base = OTHER; note = 2'-O-methylguanosine-3'-phosphate
  modified_base 15: mod_base = OTHER; note = 2'-O-methylguanosine-3'-phosphate
  modified_base 16: mod_base = OTHER; note = 2'-O-methyluridine-3'-phosphate
  modified_base 17: mod_base = OTHER; note = 2'-O-methyluridine-3'-phosphate
  modified_base 18: mod_base = OTHER; note = 2'-O-methyluridine-3'-phosphate
  modified_base 19: mod_base = OTHER; note = 2'-O-methyluridine-3'-phosphorothioate
  modified_base 20: mod_base = OTHER; note = 2'-O-methylguanosine-3'-phosphorothioate
  modified_base 21: mod_base = OTHER; note = 2'-O-methyladenosine
cagtgcctgctctggttttga

SEQ ID NO: 407 - RNA, 21 nt, synthetic construct
  source 1..21: mol_type = other RNA
  modified_base 1: mod_base = OTHER; note = 2'-O-methylcytidine-3'-phosphorothioate
  modified_base 2: mod_base = OTHER; note = 2'-O-methyluridine-3'-phosphorothioate
  modified_base 3: mod_base = OTHER; note = 2'-O-methylguanosine-3'-phosphate
  modified_base 4: mod_base = OTHER; note = 2'-O-methylguanosine-3'-phosphate
  modified_base 5: mod_base = OTHER; note = 2'-O-methyluridine-3'-phosphate
  modified_base 6: mod_base = OTHER; note = 2'-O-hexadecyl-uridine-3'-phosphate
  modified_base 7: mod_base = OTHER; note = 2'-deoxy-2'-fluorouridine-3'-phosphate
  modified_base 8: mod_base = OTHER; note = 2'-O-methyluridine-3'-phosphate
  modified_base 9: mod_base = OTHER; note = 2'-deoxy-2'-fluoroguanosine-3'-phosphate
  modified_base 10: mod_base = OTHER; note = 2'-deoxy-2'-fluorouridine-3'-phosphate
  modified_base 11: mod_base = OTHER; note = 2'-deoxy-2'-fluoroguanosine-3'-phosphate
  modified_base 12: mod_base = OTHER; note = 2'-O-methylguanosine-3'-phosphate
  modified_base 13: mod_base = OTHER; note = 2'-O-methyladenosine-3'-phosphate
  modified_base 14: mod_base = OTHER; note = 2'-O-methyladenosine-3'-phosphate
  modified_base 15: mod_base = OTHER; note = 2'-O-methyluridine-3'-phosphate
  modified_base 16: mod_base = OTHER; note = 2'-O-methylguanosine-3'-phosphate
  modified_base 17: mod_base = OTHER; note = 2'-O-methyladenosine-3'-phosphate
  modified_base 18: mod_base = OTHER; note = 2'-O-methylguanosine-3'-phosphate
  modified_base 19: mod_base = OTHER; note = 2'-O-methylcytidine-3'-phosphorothioate
  modified_base 20: mod_base = OTHER; note = 2'-O-methyladenosine-3'-phosphorothioate
  modified_base 21: mod_base = OTHER; note = 2'-O-methyladenosine
ctggttttgtggaatgagcaa

SEQ ID NO: 408 - RNA, 21 nt, synthetic construct
  source 1..21: mol_type = other RNA
  modified_base 1: mod_base = OTHER; note = 2'-O-methylcytidine-3'-phosphorothioate
  modified_base 2: mod_base = OTHER; note = 2'-O-methyluridine-3'-phosphorothioate
  modified_base 3: mod_base = OTHER; note = 2'-O-methylguanosine-3'-phosphate
  modified_base 4: mod_base = OTHER; note = 2'-O-methylguanosine-3'-phosphate
  modified_base 5: mod_base = OTHER; note = 2'-O-methyladenosine-3'-phosphate
  modified_base 6: mod_base = OTHER; note = 2'-O-hexadecyl-guanosine-3'-phosphate
  modified_base 7: mod_base = OTHER; note = 2'-deoxy-2'-fluoroguanosine-3'-phosphate
  modified_base 8: mod_base = OTHER; note = 2'-O-methyladenosine-3'-phosphate
  modified_base 9: mod_base = OTHER; note = 2'-deoxy-2'-fluorocytidine-3'-phosphate
  modified_base 10: mod_base = OTHER; note = 2'-deoxy-2'-fluoroadenosine-3'-phosphate
  modified_base 11: mod_base = OTHER; note = 2'-deoxy-2'-fluorouridine-3'-phosphate
  modified_base 12: mod_base = OTHER; note = 2'-O-methylcytidine-3'-phosphate
  modified_base 13: mod_base = OTHER; note = 2'-O-methyladenosine-3'-phosphate
  modified_base 14: mod_base = OTHER; note = 2'-O-methylguanosine-3'-phosphate
  modified_base 15: mod_base = OTHER; note = 2'-O-methylcytidine-3'-phosphate
  modified_base 16: mod_base = OTHER; note = 2'-O-methylguanosine-3'-phosphate
  modified_base 17: mod_base = OTHER; note = 2'-O-methyladenosine-3'-phosphate
  modified_base 18: mod_base = OTHER; note = 2'-O-methylguanosine-3'-phosphate
  modified_base 19: mod_base = OTHER; note = 2'-O-methylguanosine-3'-phosphorothioate
  modified_base 20: mod_base = OTHER; note = 2'-O-methyladenosine-3'-phosphorothioate
  modified_base 21: mod_base = OTHER; note = 2'-O-methyladenosine
ctggaggacatcagcgaggaa

SEQ ID NO: 409 - RNA, 21 nt, synthetic construct
  source 1..21: mol_type = other RNA
  modified_base 1: mod_base = OTHER; note = 2'-O-methyladenosine-3'-phosphorothioate
  modified_base 2: mod_base = OTHER; note = 2'-O-methyluridine-3'-phosphorothioate
  modified_base 3: mod_base = OTHER; note = 2'-O-methylcytidine-3'-phosphate
  modified_base 4: mod_base = OTHER; note = 2'-O-methyladenosine-3'-phosphate
  modified_base 5: mod_base = OTHER; note = 2'-O-methylguanosine-3'-phosphate
  modified_base 6: mod_base = OTHER; note = 2'-O-hexadecyl-cytidine-3'-phosphate
  modified_base 7: mod_base = OTHER; note = 2'-deoxy-2'-fluoroguanosine-3'-phosphate
  modified_base 8: mod_base = OTHER; note = 2'-O-methyladenosine-3'-phosphate
  modified_base 9: mod_base = OTHER; note = 2'-deoxy-2'-fluoroguanosine-3'-phosphate
  modified_base 10: mod_base = OTHER; note = 2'-deoxy-2'-fluoroguanosine-3'-phosphate
  modified_base 11: mod_base = OTHER; note = 2'-deoxy-2'-fluoroadenosine-3'-phosphate
  modified_base 12: mod_base = OTHER; note = 2'-O-methylcytidine-3'-phosphate
  modified_base 13: mod_base = OTHER; note = 2'-O-methylcytidine-3'-phosphate
  modified_base 14: mod_base = OTHER; note = 2'-O-methylcytidine-3'-phosphate
  modified_base 15: mod_base = OTHER; note = 2'-O-methylguanosine-3'-phosphate
  modified_base 16: mod_base = OTHER; note = 2'-O-methyladenosine-3'-phosphate
  modified_base 17: mod_base = OTHER; note = 2'-O-methylguanosine-3'-phosphate
  modified_base 18: mod_base = OTHER; note = 2'-O-methylcytidine-3'-phosphate
  modified_base 19: mod_base = OTHER; note = 2'-O-methyluridine-3'-phosphorothioate
  modified_base 20: mod_base = OTHER; note = 2'-O-methylguanosine-3'-phosphorothioate
  modified_base 21: mod_base = OTHER; note = 2'-O-methyladenosine
atcagcgaggacccgagctga

SEQ ID NO: 410 - RNA, 21 nt, synthetic construct
  source 1..21: mol_type = other RNA
  modified_base 1: mod_base = OTHER; note = 2'-O-methylcytidine-3'-phosphorothioate
  modified_base 2: mod_base = OTHER; note = 2'-O-methylguanosine-3'-phosphorothioate
  modified_base 3: mod_base = OTHER; note = 2'-O-methyluridine-3'-phosphate
  modified_base 4: mod_base = OTHER; note = 2'-O-methylguanosine-3'-phosphate
  modified_base 5: mod_base = OTHER; note = 2'-O-methyluridine-3'-phosphate
  modified_base 6: mod_base = OTHER; note = 2'-O-hexadecyl-guanosine-3'-phosphate
  modified_base 7: mod_base = OTHER; note = 2'-deoxy-2'-fluoroguanosine-3'-phosphate
  modified_base 8: mod_base = OTHER; note = 2'-O-methyluridine-3'-phosphate
  modified_base 9: mod_base = OTHER; note = 2'-deoxy-2'-fluorocytidine-3'-phosphate
  modified_base 10: mod_base = OTHER; note = 2'-deoxy-2'-fluoroadenosine-3'-phosphate
  modified_base 11: mod_base = OTHER; note = 2'-deoxy-2'-fluoroadenosine-3'-phosphate
  modified_base 12: mod_base = OTHER; note = 2'-O-methylcytidine-3'-phosphate
  modified_base 13: mod_base = OTHER; note = 2'-O-methylcytidine-3'-phosphate
  modified_base 14: mod_base = OTHER; note = 2'-O-methyluridine-3'-phosphate
  modified_base 15: mod_base = OTHER; note = 2'-O-methylcytidine-3'-phosphate
  modified_base 16: mod_base = OTHER; note = 2'-O-methyladenosine-3'-phosphate
  modified_base 17: mod_base = OTHER; note = 2'-O-methyladenosine-3'-phosphate
  modified_base 18: mod_base = OTHER; note = 2'-O-methyluridine-3'-phosphate
  modified_base 19: mod_base = OTHER; note = 2'-O-methylguanosine-3'-phosphorothioate
  modified_base 20: mod_base = OTHER; note = 2'-O-methylcytidine-3'-phosphorothioate
  modified_base 21: mod_base = OTHER; note = 2'-O-methyladenosine
cgtgtggtcaacctcaatgca

SEQ ID NO: 411 - RNA, 21 nt, synthetic construct
  source 1..21: mol_type = other RNA
  modified_base 1: mod_base = OTHER; note = 2'-O-methyladenosine-3'-phosphorothioate
  modified_base 2: mod_base = OTHER; note = 2'-O-methyladenosine-3'-phosphorothioate
  modified_base 3: mod_base = OTHER; note = 2'-O-methylcytidine-3'-phosphate
  modified_base 4: mod_base = OTHER; note = 2'-O-methylcytidine-3'-phosphate
  modified_base 5: mod_base = OTHER; note = 2'-O-methyluridine-3'-phosphate
  modified_base 6: mod_base = OTHER; note = 2'-O-hexadecyl-cytidine-3'-phosphate
  modified_base 7: mod_base = OTHER; note = 2'-deoxy-2'-fluoroadenosine-3'-phosphate
  modified_base 8: mod_base = OTHER; note = 2'-O-methyladenosine-3'-phosphate
  modified_base 9: mod_base = OTHER; note = 2'-deoxy-2'-fluorouridine-3'-phosphate
  modified_base 10: mod_base = OTHER; note = 2'-deoxy-2'-fluoroguanosine-3'-phosphate
  modified_base 11: mod_base = OTHER; note = 2'-deoxy-2'-fluorocytidine-3'-phosphate
  modified_base 12: mod_base = OTHER; note = 2'-O-methylcytidine-3'-phosphate
  modified_base 13: mod_base = OTHER; note = 2'-O-methylcytidine-3'-phosphate
  modified_base 14: mod_base = OTHER; note = 2'-O-methyluridine-3'-phosphate
  modified_base 15: mod_base = OTHER; note = 2'-O-methylguanosine-3'-phosphate
  modified_base 16: mod_base = OTHER; note = 2'-O-methylcytidine-3'-phosphate
  modified_base 17: mod_base = OTHER; note = 2'-O-methyluridine-3'-phosphate
  modified_base 18: mod_base = OTHER; note = 2'-O-methylcytidine-3'-phosphate
  modified_base 19: mod_base = OTHER; note = 2'-O-methyladenosine-3'-phosphorothioate
  modified_base 20: mod_base = OTHER; note = 2'-O-methyluridine-3'-phosphorothioate
  modified_base 21: mod_base = OTHER; note = 2'-O-methyladenosine
aacctcaatgccctgctcata

SEQ ID NO: 412 - RNA, 21 nt, synthetic construct
  source 1..21: mol_type = other RNA
  modified_base 1: mod_base = OTHER; note = 2'-O-methylcytidine-3'-phosphorothioate
  modified_base 2: mod_base = OTHER; note = 2'-O-methylcytidine-3'-phosphorothioate
  modified_base 3: mod_base = OTHER; note = 2'-O-methyluridine-3'-phosphate
  modified_base 4: mod_base = OTHER; note = 2'-O-methylguanosine-3'-phosphate
  modified_base 5: mod_base = OTHER; note = 2'-O-methylcytidine-3'-phosphate
  modified_base 6: mod_base = OTHER; note = 2'-O-hexadecyl-uridine-3'-phosphate
  modified_base 7: mod_base = OTHER; note = 2'-deoxy-2'-fluorocytidine-3'-phosphate
  modified_base 8: mod_base = OTHER; note = 2'-O-methyladenosine-3'-phosphate
  modified_base 9: mod_base = OTHER; note = 2'-deoxy-2'-fluorouridine-3'-phosphate
  modified_base 10: mod_base = OTHER; note = 2'-deoxy-2'-fluoroguanosine-3'-phosphate
  modified_base 11: mod_base = OTHER; note = 2'-deoxy-2'-fluoroadenosine-3'-phosphate
  modified_base 12: mod_base = OTHER; note = 2'-O-methyluridine-3'-phosphate
  modified_base 13: mod_base = OTHER; note = 2'-O-methylguanosine-3'-phosphate
  modified_base 14: mod_base = OTHER; note = 2'-O-methylguanosine-3'-phosphate
  modified_base 15: mod_base = OTHER; note = 2'-O-methylcytidine-3'-phosphate
  modified_base 16: mod_base = OTHER; note = 2'-O-methyladenosine-3'-phosphate
  modified_base 17: mod_base = OTHER; note = 2'-O-methylguanosine-3'-phosphate
  modified_base 18: mod_base = OTHER; note = 2'-O-methyluridine-3'-phosphate
  modified_base 19: mod_base = OTHER; note = 2'-O-methylguanosine-3'-phosphorothioate
  modified_base 20: mod_base = OTHER; note = 2'-O-methylguanosine-3'-phosphorothioate
  modified_base 21: mod_base = OTHER; note = 2'-O-methyladenosine
cctgctcatgatggcagtgga

SEQ ID NO: 413 - RNA, 21 nt, synthetic construct
  source 1..21: mol_type = other RNA
  modified_base 1: mod_base = OTHER; note = 2'-O-methylguanosine-3'-phosphorothioate
  modified_base 2: mod_base = OTHER; note = 2'-O-methylcytidine-3'-phosphorothioate
  modified_base 3: mod_base = OTHER; note = 2'-O-methyladenosine-3'-phosphate
  modified_base 4: mod_base = OTHER; note = 2'-O-methylguanosine-3'-phosphate
  modified_base 5: mod_base = OTHER; note = 2'-O-methyluridine-3'-phosphate
  modified_base 6: mod_base = OTHER; note = 2'-O-hexadecyl-guanosine-3'-phosphate
  modified_base 7: mod_base = OTHER; note = 2'-deoxy-2'-fluoroguanosine-3'-phosphate
  modified_base 8: mod_base = OTHER; note = 2'-O-methylcytidine-3'-phosphate
  modified_base 9: mod_base = OTHER; note = 2'-deoxy-2'-fluorocytidine-3'-phosphate
  modified_base 10: mod_base = OTHER; note = 2'-deoxy-2'-fluoroguanosine-3'-phosphate
  modified_base 11: mod_base = OTHER; note = 2'-deoxy-2'-fluorouridine-3'-phosphate
  modified_base 12: mod_base = OTHER; note = 2'-O-methylguanosine-3'-phosphate
  modified_base 13: mod_base = OTHER; note = 2'-O-methyluridine-3'-phosphate
  modified_base 14: mod_base = OTHER; note = 2'-O-methyluridine-3'-phosphate
  modified_base 15: mod_base = OTHER; note = 2'-O-methylcytidine-3'-phosphate
  modified_base 16: mod_base = OTHER; note = 2'-O-methylcytidine-3'-phosphate
  modified_base 17: mod_base = OTHER; note = 2'-O-methyluridine-3'-phosphate
  modified_base 18: mod_base = OTHER; note = 2'-O-methylcytidine-3'-phosphate
  modified_base 19: mod_base = OTHER; note = 2'-O-methyluridine-3'-phosphorothioate
  modified_base 20: mod_base = OTHER; note = 2'-O-methylguanosine-3'-phosphorothioate
  modified_base 21: mod_base = OTHER; note = 2'-O-methyladenosine
gcagtggccgtgttcctctga

SEQ ID NO: 414 - RNA, 21 nt, synthetic construct
  source 1..21: mol_type = other RNA
  modified_base 1: mod_base = OTHER; note = 2'-O-methyluridine-3'-phosphorothioate
  modified_base 2: mod_base = OTHER; note = 2'-O-methylcytidine-3'-phosphorothioate
  modified_base 3: mod_base = OTHER; note = 2'-O-methyluridine-3'-phosphate
  modified_base 4: mod_base = OTHER; note = 2'-O-methyladenosine-3'-phosphate
  modified_base 5: mod_base = OTHER; note = 2'-O-methyluridine-3'-phosphate
  modified_base 6: mod_base = OTHER; note = 2'-O-hexadecyl-guanosine-3'-phosphate
  modified_base 7: mod_base = OTHER; note = 2'-deoxy-2'-fluorocytidine-3'-phosphate
  modified_base 8: mod_base = OTHER; note = 2'-O-methylcytidine-3'-phosphate
  modified_base 9: mod_base = OTHER; note = 2'-deoxy-2'-fluorouridine-3'-phosphate
  modified_base 10: mod_base = OTHER; note = 2'-deoxy-2'-fluoroadenosine-3'-phosphate
  modified_base 11: mod_base = OTHER; note = 2'-deoxy-2'-fluoroadenosine-3'-phosphate
  modified_base 12: mod_base = OTHER; note = 2'-O-methylguanosine-3'-phosphate
  modified_base 13: mod_base = OTHER; note = 2'-O-methyladenosine-3'-phosphate
  modified_base 14: mod_base = OTHER; note = 2'-O-methylcytidine-3'-phosphate
  modified_base 15: mod_base = OTHER; note = 2'-O-methylcytidine-3'-phosphate
  modified_base 16: mod_base = OTHER; note = 2'-O-methyladenosine-3'-phosphate
  modified_base 17: mod_base = OTHER; note = 2'-O-methyladenosine-3'-phosphate
  modified_base 18: mod_base = OTHER; note = 2'-O-methylcytidine-3'-phosphate
  modified_base 19: mod_base = OTHER; note = 2'-O-methyluridine-3'-phosphorothioate
  modified_base 20: mod_base = OTHER; note = 2'-O-methylguanosine-3'-phosphorothioate
  modified_base 21: mod_base = OTHER; note = 2'-O-methyladenosine
tctatgcctaagaccaactga

SEQ ID NO: 415 - RNA, 21 nt, synthetic construct
  source 1..21: mol_type = other RNA
  modified_base 1: mod_base = OTHER; note = 2'-O-methyladenosine-3'-phosphorothioate
  modified_base 2: mod_base = OTHER; note = 2'-O-methyladenosine-3'-phosphorothioate
  modified_base 3: mod_base = OTHER; note = 2'-O-methylguanosine-3'-phosphate
  modified_base 4: mod_base = OTHER; note = 2'-O-methyladenosine-3'-phosphate
  modified_base 5: mod_base = OTHER; note = 2'-O-methylcytidine-3'-phosphate
  modified_base 6: mod_base = OTHER; note = 2'-O-hexadecyl-cytidine-3'-phosphate
  modified_base 7: mod_base = OTHER; note = 2'-deoxy-2'-fluoroadenosine-3'-phosphate
  modified_base 8: mod_base = OTHER; note = 2'-O-methyladenosine-3'-phosphate
  modified_base 9: mod_base = OTHER; note = 2'-deoxy-2'-fluorocytidine-3'-phosphate
  modified_base 10: mod_base = OTHER; note = 2'-deoxy-2'-fluorouridine-3'-phosphate
  modified_base 11: mod_base = OTHER; note = 2'-deoxy-2'-fluoroguanosine-3'-phosphate
  modified_base 12: mod_base = OTHER; note = 2'-O-methylcytidine-3'-phosphate
  modified_base 13: mod_base = OTHER; note = 2'-O-methylguanosine-3'-phosphate
  modified_base 14: mod_base = OTHER; note = 2'-O-methyluridine-3'-phosphate
  modified_base 15: mod_base = OTHER; note = 2'-O-methyluridine-3'-phosphate
  modified_base 16: mod_base = OTHER; note = 2'-O-methylguanosine-3'-phosphate
  modified_base 17: mod_base = OTHER; note = 2'-O-methylguanosine-3'-phosphate
  modified_base 18: mod_base = OTHER; note = 2'-O-methyladenosine-3'-phosphate
  modified_base 19: mod_base = OTHER; note = 2'-O-methylcytidine-3'-phosphorothioate
  modified_base 20: mod_base = OTHER; note = 2'-O-methyladenosine-3'-phosphorothioate
  modified_base 21: mod_base = OTHER; note = 2'-O-methyladenosine
aagaccaactgcgttggacaa

SEQ ID NO: 416 - RNA, 21 nt, synthetic construct
  source 1..21: mol_type = other RNA
  modified_base 1: mod_base = OTHER; note = 2'-O-methylguanosine-3'-phosphorothioate
  modified_base 2: mod_base = OTHER; note = 2'-O-methylcytidine-3'-phosphorothioate
  modified_base 3: mod_base = OTHER; note = 2'-O-methylguanosine-3'-phosphate
  modified_base 4: mod_base = OTHER; note = 2'-O-methyluridine-3'-phosphate
  modified_base 5: mod_base = OTHER; note = 2'-O-methyluridine-3'-phosphate
  modified_base 6: mod_base = OTHER; note = 2'-O-hexadecyl-guanosine-3'-phosphate
  modified_base 7: mod_base = OTHER; note = 2'-deoxy-2'-fluoroguanosine-3'-phosphate
  modified_base 8: mod_base = OTHER; note = 2'-O-methyladenosine-3'-phosphate
  modified_base 9: mod_base = OTHER; note = 2'-deoxy-2'-fluorocytidine-3'-phosphate
  modified_base 10: mod_base = OTHER; note = 2'-deoxy-2'-fluoroadenosine-3'-phosphate
  modified_base 11: mod_base = OTHER; note = 2'-deoxy-2'-fluorocytidine-3'-phosphate
  modified_base 12: mod_base = OTHER; note = 2'-O-methylcytidine-3'-phosphate
  modified_base 13: mod_base = OTHER; note = 2'-O-methyladenosine-3'-phosphate
  modified_base 14: mod_base = OTHER; note = 2'-O-methyluridine-3'-phosphate
  modified_base 15: mod_base = OTHER; note = 2'-O-methyladenosine-3'-phosphate
  modified_base 16: mod_base = OTHER; note = 2'-O-methyladenosine-3'-phosphate
  modified_base 17: mod_base = OTHER; note = 2'-O-methylguanosine-3'-phosphate
  modified_base 18: mod_base = OTHER; note = 2'-O-methylcytidine-3'-phosphate
  modified_base 19: mod_base = OTHER; note = 2'-O-methylcytidine-3'-phosphorothioate
  modified_base 20: mod_base = OTHER; note = 2'-O-methyladenosine-3'-phosphorothioate
  modified_base 21: mod_base = OTHER; note = 2'-O-methyladenosine
gcgttggacaccataagccaa

SEQ ID NO: 417 - RNA, 21 nt, synthetic construct
  source 1..21: mol_type = other RNA
  modified_base 1: mod_base = OTHER; note = 2'-O-methylcytidine-3'-phosphorothioate
  modified_base 2: mod_base = OTHER; note = 2'-O-methylcytidine-3'-phosphorothioate
  modified_base 3: mod_base = OTHER; note = 2'-O-methyladenosine-3'-phosphate
  modified_base 4: mod_base = OTHER; note = 2'-O-methylcytidine-3'-phosphate
  modified_base 5: mod_base = OTHER; note = 2'-O-methyladenosine-3'-phosphate
  modified_base 6: mod_base = OTHER; note = 2'-O-hexadecyl-guanosine-3'-phosphate
  modified_base 7: mod_base = OTHER; note = 2'-deoxy-2'-fluorocytidine-3'-phosphate
  modified_base 8: mod_base = OTHER; note = 2'-O-methylcytidine-3'-phosphate
  modified_base 9: mod_base = OTHER; note = 2'-deoxy-2'-fluorouridine-3'-phosphate
  modified_base 10: mod_base = OTHER; note = 2'-deoxy-2'-fluorocytidine-3'-phosphate
  modified_base 11: mod_base = OTHER; note = 2'-deoxy-2'-fluoroadenosine-3'-phosphate
  modified_base 12: mod_base = OTHER; note = 2'-O-methylcytidine-3'-phosphate
  modified_base 13: mod_base = OTHER; note = 2'-O-methyladenosine-3'-phosphate
  modified_base 14: mod_base = OTHER; note = 2'-O-methylguanosine-3'-phosphate
  modified_base 15: mod_base = OTHER; note = 2'-O-methylguanosine-3'-phosphate
  modified_base 16: mod_base = OTHER; note = 2'-O-methyladenosine-3'-phosphate
  modified_base 17: mod_base = OTHER; note = 2'-O-methyladenosine-3'-phosphate
  modified_base 18: mod_base = OTHER; note = 2'-O-methylguanosine-3'-phosphate
  modified_base 19: mod_base = OTHER; note = 2'-O-methyluridine-3'-phosphorothioate
  modified_base 20: mod_base = OTHER; note = 2'-O-methylguanosine-3'-phosphorothioate
  modified_base 21: mod_base = OTHER; note = 2'-O-methyladenosine
ccacagcctcacaggaagtga

SEQ ID NO: 418 - RNA, 21 nt, synthetic construct
  source 1..21: mol_type = other RNA
  modified_base 1: mod_base = OTHER; note = 2'-O-methylcytidine-3'-phosphorothioate
  modified_base 2: mod_base = OTHER; note = 2'-O-methyluridine-3'-phosphorothioate
  modified_base 3: mod_base = OTHER; note = 2'-O-methylcytidine-3'-phosphate
  modified_base 4: mod_base = OTHER; note = 2'-O-methylcytidine-3'-phosphate
  modified_base 5: mod_base = OTHER; note = 2'-O-methylcytidine-3'-phosphate
  modified_base 6: mod_base = OTHER; note = 2'-O-hexadecyl-guanosine-3'-phosphate
  modified_base 7: mod_base = OTHER; note = 2'-deoxy-2'-fluoroguanosine-3'-phosphate
  modified_base 8: mod_base = OTHER; note = 2'-O-methylcytidine-3'-phosphate
  modified_base 9: mod_base = OTHER; note = 2'-deoxy-2'-fluorocytidine-3'-phosphate
  modified_base 10: mod_base = OTHER; note = 2'-deoxy-2'-fluorouridine-3'-phosphate
  modified_base 11: mod_base = OTHER; note = 2'-deoxy-2'-fluorouridine-3'-phosphate
  modified_base 12: mod_base = OTHER; note = 2'-O-methylcytidine-3'-phosphate
  modified_base 13: mod_base = OTHER; note = 2'-O-methylcytidine-3'-phosphate
  modified_base 14: mod_base = OTHER; note = 2'-O-methyluridine-3'-phosphate
  modified_base 15: mod_base = OTHER; note = 2'-O-methylcytidine-3'-phosphate
  modified_base 16: mod_base = OTHER; note = 2'-O-methyluridine-3'-phosphate
  modified_base 17: mod_base = OTHER; note = 2'-O-methylguanosine-3'-phosphate
  modified_base 18: mod_base = OTHER; note = 2'-O-methylcytidine-3'-phosphate
  modified_base 19: mod_base = OTHER; note = 2'-O-methylcytidine-3'-phosphorothioate
  modified_base 20: mod_base = OTHER; note = 2'-O-methyluridine-3'-phosphorothioate
  modified_base 21: mod_base = OTHER; note = 2'-O-methyladenosine
ctcccggccttcctctgccta

SEQ ID NO: 419 - RNA, 21 nt, synthetic construct
  source 1..21: mol_type = other RNA
  modified_base 1: mod_base = OTHER; note = 2'-O-methylcytidine-3'-phosphorothioate
  modified_base 2: mod_base = OTHER; note = 2'-O-methylcytidine-3'-phosphorothioate
  modified_base 3: mod_base = OTHER; note = 2'-O-methyladenosine-3'-phosphate
  modified_base 4: mod_base = OTHER; note = 2'-O-methylcytidine-3'-phosphate
  modified_base 5: mod_base = OTHER; note = 2'-O-methyluridine-3'-phosphate
  modified_base 6: mod_base = OTHER; note = 2'-O-hexadecyl-guanosine-3'-phosphate
  modified_base 7: mod_base = OTHER; note = 2'-deoxy-2'-fluorocytidine-3'-phosphate
  modified_base 8: mod_base = OTHER; note = 2'-O-methyladenosine-3'-phosphate
  modified_base 9: mod_base = OTHER; note = 2'-deoxy-2'-fluorouridine-3'-phosphate
  modified_base 10: mod_base = OTHER; note = 2'-deoxy-2'-fluorocytidine-3'-phosphate
  modified_base 11: mod_base = OTHER; note = 2'-deoxy-2'-fluorouridine-3'-phosphate
  modified_base 12: mod_base = OTHER; note = 2'-O-methylguanosine-3'-phosphate
  modified_base 13: mod_base = OTHER; note = 2'-O-methyladenosine-3'-phosphate
  modified_base 14: mod_base = OTHER; note = 2'-O-methyluridine-3'-phosphate
  modified_base 15: mod_base = OTHER; note = 2'-O-methyluridine-3'-phosphate
  modified_base 16: mod_base = OTHER; note = 2'-O-methylguanosine-3'-phosphate
  modified_base 17: mod_base = OTHER; note = 2'-O-methylguanosine-3'-phosphate
  modified_base 18: mod_base = OTHER; note = 2'-O-methylcytidine-3'-phosphate
  modified_base 19: mod_base = OTHER; note = 2'-O-methyladenosine-3'-phosphorothioate
  modified_base 20: mod_base = OTHER; note = 2'-O-methylguanosine-3'-phosphorothioate
  modified_base 21: mod_base = OTHER; note = 2'-O-methyladenosine
ccactgcatctgattggcaga

SEQ ID NO: 420 - RNA, 21 nt, synthetic construct
  source 1..21: mol_type = other RNA
  modified_base 1: mod_base = OTHER; note = 2'-O-methylguanosine-3'-phosphorothioate
  modified_base 2: mod_base = OTHER; note = 2'-O-methylcytidine-3'-phosphorothioate
  modified_base 3: mod_base = OTHER; note = 2'-O-methyladenosine-3'-phosphate
  modified_base 4: mod_base = OTHER; note = 2'-O-methylguanosine-3'-phosphate
  modified_base 5: mod_base = OTHER; note = 2'-O-methyluridine-3'-phosphate
  modified_base 6: mod_base = OTHER; note = 2'-O-hexadecyl-cytidine-3'-phosphate
  modified_base 7: mod_base = OTHER; note = 2'-deoxy-2'-fluoroadenosine-3'-phosphate
  modified_base 8: mod_base = OTHER; note = 2'-O-methylcytidine-3'-phosphate
  modified_base 9: mod_base = OTHER; note = 2'-deoxy-2'-fluorouridine-3'-phosphate
  modified_base 10: mod_base = OTHER; note = 2'-deoxy-2'-fluorouridine-3'-phosphate
  modified_base 11: mod_base = OTHER; note = 2'-deoxy-2'-fluorocytidine-3'-phosphate
  modified_base 12: mod_base = OTHER; note = 2'-O-methylcytidine-3'-phosphate
  modified_base 13: mod_base = OTHER; note = 2'-O-methylcytidine-3'-phosphate
  modified_base 14: mod_base = OTHER; note = 2'-O-methyladenosine-3'-phosphate
  modified_base 15: mod_base = OTHER; note = 2'-O-methyluridine-3'-phosphate
  modified_base 16: mod_base = OTHER; note = 2'-O-methylguanosine-3'-phosphate
  modified_base 17: mod_base = OTHER; note = 2'-O-methyladenosine-3'-phosphate
  modified_base 18: mod_base = OTHER; note = 2'-O-methylguanosine-3'-phosphate
  modified_base 19: mod_base = OTHER; note = 2'-O-methylguanosine-3'-phosphorothioate
  modified_base 20: mod_base = OTHER; note = 2'-O-methylguanosine-3'-phosphorothioate
  modified_base 21: mod_base = OTHER; note = 2'-O-methyladenosine
gcagtcacttcccatgaggga

SEQ ID NO: 421 - RNA, 21 nt, synthetic construct
  source 1..21: mol_type = other RNA
  modified_base 1: mod_base = OTHER; note = 2'-O-methylcytidine-3'-phosphorothioate
  modified_base 2: mod_base = OTHER; note = 2'-O-methyluridine-3'-phosphorothioate
  modified_base 3: mod_base = OTHER; note = 2'-O-methylguanosine-3'-phosphate
  modified_base 4: mod_base = OTHER; note = 2'-O-methylcytidine-3'-phosphate
  modified_base 5: mod_base = OTHER; note = 2'-O-methyladenosine-3'-phosphate
  modified_base 6: mod_base = OTHER; note = 2'-O-hexadecyl-guanosine-3'-phosphate
  modified_base 7: mod_base = OTHER; note = 2'-deoxy-2'-fluorouridine-3'-phosphate
  modified_base 8: mod_base = OTHER; note = 2'-O-methyluridine-3'-phosphate
  modified_base 9: mod_base = OTHER; note = 2'-deoxy-2'-fluoroguanosine-3'-phosphate
  modified_base 10: mod_base = OTHER; note = 2'-deoxy-2'-fluorocytidine-3'-phosphate
  modified_base 11: mod_base = OTHER; note = 2'-deoxy-2'-fluorocytidine-3'-phosphate
  modified_base 12: mod_base = OTHER; note = 2'-O-methylcytidine-3'-phosphate
  modified_base 13: mod_base = OTHER; note = 2'-O-methyluridine-3'-phosphate
  modified_base 14: mod_base = OTHER; note = 2'-O-methyladenosine-3'-phosphate
  modified_base 15: mod_base = OTHER; note = 2'-O-methyladenosine-3'-phosphate
  modified_base 16: mod_base = OTHER; note = 2'-O-methylguanosine-3'-phosphate
  modified_base 17: mod_base = OTHER; note = 2'-O-methylguanosine-3'-phosphate
  modified_base 18: mod_base = OTHER; note = 2'-O-methyladenosine-3'-phosphate
  modified_base 19: mod_base = OTHER; note = 2'-O-methyladenosine-3'-phosphorothioate
  modified_base 20: mod_base = OTHER; note = 2'-O-methyladenosine-3'-phosphorothioate
  modified_base 21: mod_base = OTHER; note = 2'-O-methyladenosine
ctgcagttgccctaaggaaaa

SEQ ID NO: 422 - RNA, 23 nt, synthetic construct
  source 1..23: mol_type = other RNA
  modified_base 1: mod_base = OTHER; note = 2'-O-methyluridine-3'-phosphorothioate 5'-(E)-Vinylphosphonate
  modified_base 2: mod_base = OTHER; note = 2'-deoxy-2'-fluorocytidine-3'-phosphorothioate
  modified_base 3: mod_base = OTHER; note = 2'-O-methyluridine-3'-phosphate
  modified_base 4: mod_base = OTHER; note = 2'-O-methylguanosine-3'-phosphate
  modified_base 5: mod_base = OTHER; note = 2'-O-methyluridine-3'-phosphate
  modified_base 6: mod_base = OTHER; note = 2'-deoxy-2'-fluoroguanosine-3'-phosphate
  modified_base 7: mod_base = OTHER; note = 2'-O-methyluridine-3'-phosphate
  modified_base 8: mod_base = OTHER; note = 2'-deoxy-2'-fluoroguanosine-3'-phosphate
  modified_base 9: mod_base = OTHER; note = 2'-deoxy-2'-fluorocytidine-3'-phosphate
  modified_base 10: mod_base = OTHER; note = 2'-O-methyluridine-3'-phosphate
  modified_base 11: mod_base = OTHER; note = 2'-O-methylcytidine-3'-phosphate
  modified_base 12: mod_base = OTHER; note = 2'-O-methylcytidine-3'-phosphate
  modified_base 13: mod_base = OTHER; note = 2'-O-methyluridine-3'-phosphate
  modified_base 14: mod_base = OTHER; note = 2'-deoxy-2'-fluorocytidine-3'-phosphate
  modified_base 15: mod_base = OTHER; note = 2'-O-methylcytidine-3'-phosphate
  modified_base 16: mod_base = OTHER; note = 2'-deoxy-2'-fluoroadenosine-3'-phosphate
  modified_base 17: mod_base = OTHER; note = 2'-O-methyluridine-3'-phosphate
  modified_base 18: mod_base = OTHER; note = 2'-O-methyluridine-3'-phosphate
  modified_base 19: mod_base = OTHER; note = 2'-O-methylcytidine-3'-phosphate
  modified_base 20: mod_base = OTHER; note = 2'-O-methyluridine-3'-phosphate
  modified_base 21: mod_base = OTHER; note = 2'-O-methylcytidine-3'-phosphorothioate
  modified_base 22: mod_base = OTHER; note = 2'-O-methylcytidine-3'-phosphorothioate
  modified_base 23: mod_base = OTHER; note = 2'-O-methylcytidine
tctgtgtgctcctccattctccc

SEQ ID NO: 423 - RNA, 23 nt, synthetic construct
  source 1..23: mol_type = other RNA
  modified_base 1: mod_base = OTHER; note = 2'-O-methyluridine-3'-phosphorothioate 5'-(E)-Vinylphosphonate
  modified_base 2: mod_base = OTHER; note = 2'-deoxy-2'-fluoroadenosine-3'-phosphorothioate
  modified_base 3: mod_base = OTHER; note = 2'-O-methylguanosine-3'-phosphate
  modified_base 4: mod_base = OTHER; note = 2'-O-methylcytidine-3'-phosphate
  modified_base 5: mod_base = OTHER; note = 2'-O-methylcytidine-3'-phosphate
  modified_base 6: mod_base = OTHER; note = 2'-deoxy-2'-fluorouridine-3'-phosphate
  modified_base 7: mod_base = OTHER; note = 2'-O-methylguanosine-3'-phosphate
  modified_base 8: mod_base = OTHER; note = 2'-deoxy-2'-fluorocytidine-3'-phosphate
  modified_base 9: mod_base = OTHER; note = 2'-deoxy-2'-fluorocytidine-3'-phosphate
  modified_base 10: mod_base = OTHER; note = 2'-O-methyluridine-3'-phosphate
  modified_base 11: mod_base = OTHER; note = 2'-O-methylcytidine-3'-phosphate
  modified_base 12: mod_base = OTHER; note = 2'-O-methyluridine-3'-phosphate
  modified_base 13: mod_base = OTHER; note = 2'-O-methylguanosine-3'-phosphate
  modified_base 14: mod_base = OTHER; note = 2'-deoxy-2'-fluorouridine-3'-phosphate
  modified_base 15: mod_base = OTHER; note = 2'-O-methylguanosine-3'-phosphate
  modified_base 16: mod_base = OTHER; note = 2'-deoxy-2'-fluorouridine-3'-phosphate
  modified_base 17: mod_base = OTHER; note = 2'-O-methylguanosine-3'-phosphate
  modified_base 18: mod_base = OTHER; note = 2'-O-methylcytidine-3'-phosphate
  modified_base 19: mod_base = OTHER; note = 2'-O-methyluridine-3'-phosphate
  modified_base 20: mod_base = OTHER; note = 2'-O-methylcytidine-3'-phosphate
  modified_base 21: mod_base = OTHER; note = 2'-O-methylcytidine-3'-phosphorothioate
  modified_base 22: mod_base = OTHER; note = 2'-O-methyluridine-3'-phosphorothioate
  modified_base 23: mod_base = OTHER; note = 2'-O-methylcytidine
tagcctgcctctgtgtgctcctc

SEQ ID NO: 424 - RNA, 23 nt, synthetic construct
  source 1..23: mol_type = other RNA
  modified_base 1: mod_base = OTHER; note = 2'-O-methyluridine-3'-phosphorothioate 5'-(E)-Vinylphosphonate
  modified_base 2: mod_base = OTHER; note = 2'-deoxy-2'-fluoroadenosine-3'-phosphorothioate
  modified_base 3: mod_base = OTHER; note = 2'-O-methyluridine-3'-phosphate
  modified_base 4: mod_base = OTHER; note = 2'-O-methylcytidine-3'-phosphate
  modified_base 5: mod_base = OTHER; note = 2'-O-methyluridine-3'-phosphate
  modified_base 6: mod_base = OTHER; note = 2'-deoxy-2'-fluorocytidine-3'-phosphate
  modified_base 7: mod_base = OTHER; note = 2'-O-methyluridine-3'-phosphate
  modified_base 8: mod_base = OTHER; note = 2'-deoxy-2'-fluoroguanosine-3'-phosphate
  modified_base 9: mod_base = OTHER; note = 2'-deoxy-2'-fluoroguanosine-3'-phosphate
  modified_base 10: mod_base = OTHER; note = 2'-O-methyluridine-3'-phosphate
  modified_base 11: mod_base = OTHER; note = 2'-O-methylguanosine-3'-phosphate
  modified_base 12: mod_base = OTHER; note = 2'-O-methylcytidine-3'-phosphate
  modified_base 13: mod_base = OTHER; note = 2'-O-methylcytidine-3'-phosphate
  modified_base 14: mod_base = OTHER; note = 2'-deoxy-2'-fluoroguanosine-3'-phosphate
  modified_base 15: mod_base = OTHER; note = 2'-O-methyladenosine-3'-phosphate
  modified_base 16: mod_base = OTHER; note = 2'-deoxy-2'-fluoroguanosine-3'-phosphate
  modified_base 17: mod_base = OTHER; note = 2'-O-methylcytidine-3'-phosphate
  modified_base 18: mod_base = OTHER; note = 2'-O-methylcytidine-3'-phosphate
  modified_base 19: mod_base = OTHER; note = 2'-O-methyluridine-3'-phosphate
  modified_base 20: mod_base = OTHER; note = 2'-O-methylguanosine-3'-phosphate
  modified_base 21: mod_base = OTHER; note = 2'-O-methylcytidine-3'-phosphorothioate
  modified_base 22: mod_base = OTHER; note = 2'-O-methylcytidine-3'-phosphorothioate
  modified_base 23: mod_base = OTHER; note = 2'-O-methyluridine
tatctctggtgccgagcctgcct

SEQ ID NO: 425 - RNA, 23 nt, synthetic construct
  source 1..23: mol_type = other RNA
  modified_base 1: mod_base = OTHER; note = 2'-O-methyluridine-3'-phosphorothioate 5'-(E)-Vinylphosphonate
  modified_base 2: mod_base = OTHER; note = 2'-deoxy-2'-fluoroguanosine-3'-phosphorothioate
  modified_base 3: mod_base = OTHER; note = 2'-O-methyluridine-3'-phosphate
  modified_base 4: mod_base = OTHER; note = 2'-O-methylcytidine-3'-phosphate
  modified_base 5: mod_base = OTHER; note = 2'-O-methyladenosine-3'-phosphate
  modified_base 6: mod_base = OTHER; note = 2'-deoxy-2'-fluoroadenosine-3'-phosphate
  modified_base 7: mod_base = OTHER; note = 2'-O-methyluridine-3'-phosphate
  modified_base 8: mod_base = OTHER; note = 2'-deoxy-2'-fluorocytidine-3'-phosphate
  modified_base 9: mod_base = OTHER; note = 2'-deoxy-2'-fluoroadenosine-3'-phosphate
  modified_base 10: mod_base = OTHER; note = 2'-O-methylguanosine-3'-phosphate
  modified_base 11: mod_base = OTHER; note = 2'-O-methylguanosine-3'-phosphate
  modified_base 12: mod_base = OTHER; note = 2'-O-methylguanosine-3'-phosphate
  modified_base 13: mod_base = OTHER; note = 2'-O-methylcytidine-3'-phosphate
  modified_base 14: mod_base = OTHER; note = 2'-deoxy-2'-fluorocytidine-3'-phosphate
  modified_base 15: mod_base = OTHER; note = 2'-O-methyluridine-3'-phosphate
  modified_base 16: mod_base = OTHER; note = 2'-deoxy-2'-fluorouridine-3'-phosphate
  modified_base 17: mod_base = OTHER; note = 2'-O-methylcytidine-3'-phosphate
  modified_base 18: mod_base = OTHER; note = 2'-O-methyluridine-3'-phosphate
  modified_base 19: mod_base = OTHER; note = 2'-O-methylguanosine-3'-phosphate
  modified_base 20: mod_base = OTHER; note = 2'-O-methylguanosine-3'-phosphate
  modified_base 21: mod_base = OTHER; note = 2'-O-methylguanosine-3'-phosphorothioate
  modified_base 22: mod_base = OTHER; note = 2'-O-methylcytidine-3'-phosphorothioate
  modified_base 23: mod_base = OTHER; note = 2'-O-methylcytidine
tgtcaatcagggccttctgggcc

SEQ ID NO: 426 - RNA, 23 nt, synthetic construct
  source 1..23: mol_type = other RNA
  modified_base 1: mod_base = OTHER; note = 2'-O-methyluridine-3'-phosphorothioate 5'-(E)-Vinylphosphonate
  modified_base 2: mod_base = OTHER; note = 2'-deoxy-2'-fluoroadenosine-3'-phosphorothioate
  modified_base 3: mod_base = OTHER; note = 2'-O-methylguanosine-3'-phosphate
  modified_base 4: mod_base = OTHER; note = 2'-O-methylcytidine-3'-phosphate
  modified_base 5: mod_base = OTHER; note = 2'-O-methyladenosine-3'-phosphate
  modified_base 6: mod_base = OTHER; note = 2'-deoxy-2'-fluoroguanosine-3'-phosphate
  modified_base 7: mod_base = OTHER; note = 2'-O-methylguanosine-3'-phosphate
  modified_base 8: mod_base = OTHER; note = 2'-deoxy-2'-fluoroadenosine-3'-phosphate
  modified_base 9: mod_base = OTHER; note = 2'-deoxy-2'-fluorouridine-3'-phosphate
  modified_base 10: mod_base = OTHER; note = 2'-O-methyluridine-3'-phosphate
  modified_base 11: mod_base = OTHER; note = 2'-O-methylguanosine-3'-phosphate
  modified_base 12: mod_base = OTHER; note = 2'-O-methyluridine-3'-phosphate
  modified_base 13: mod_base = OTHER; note = 2'-O-methylcytidine-3'-phosphate
  modified_base 14: mod_base = OTHER; note = 2'-deoxy-2'-fluoroadenosine-3'-phosphate
  modified_base 15: mod_base = OTHER; note = 2'-O-methyladenosine-3'-phosphate
  modified_base 16: mod_base = OTHER; note = 2'-deoxy-2'-fluorouridine-3'-phosphate
  modified_base 17: mod_base = OTHER; note = 2'-O-methylcytidine-3'-phosphate
  modified_base 18: mod_base = OTHER; note = 2'-O-methyladenosine-3'-phosphate
  modified_base 19: mod_base = OTHER; note = 2'-O-methylguanosine-3'-phosphate
  modified_base 20: mod_base = OTHER; note = 2'-O-methylguanosine-3'-phosphate
  modified_base 21: mod_base = OTHER; note = 2'-O-methylguanosine-3'-phosphorothioate
  modified_base 22: mod_base = OTHER; note = 2'-O-methylcytidine-3'-phosphorothioate
  modified_base 23: mod_base = OTHER; note = 2'-O-methylcytidine
tagcaggattgtcaatcagggcc

SEQ ID NO: 427 - RNA, 23 nt, synthetic construct
  source 1..23: mol_type = other RNA
  modified_base 1: mod_base = OTHER; note = 2'-O-methyluridine-3'-phosphorothioate 5'-(E)-Vinylphosphonate
  modified_base 2: mod_base = OTHER; note = 2'-deoxy-2'-fluorouridine-3'-phosphorothioate
  modified_base 3: mod_base = OTHER; note = 2'-O-methyladenosine-3'-phosphate
  modified_base 4: mod_base = OTHER; note = 2'-O-methylguanosine-3'-phosphate
  modified_base 5: mod_base = OTHER; note = 2'-O-methylguanosine-3'-phosphate
  modified_base 6: mod_base = OTHER; note = 2'-deoxy-2'-fluoroadenosine-3'-phosphate
  modified_base 7: mod_base = OTHER; note = 2'-O-methyluridine-3'-phosphate
  modified_base 8: mod_base = OTHER; note = 2'-deoxy-2'-fluoroguanosine-3'-phosphate
  modified_base 9: mod_base = OTHER; note = 2'-deoxy-2'-fluorouridine-3'-phosphate
  modified_base 10: mod_base = OTHER; note = 2'-O-methylcytidine-3'-phosphate
  modified_base 11: mod_base = OTHER; note = 2'-O-methyladenosine-3'-phosphate
  modified_base 12: mod_base = OTHER; note = 2'-O-methylguanosine-3'-phosphate
  modified_base 13: mod_base = OTHER; note = 2'-O-methylcytidine-3'-phosphate
  modified_base 14: mod_base = OTHER; note = 2'-deoxy-2'-fluoroadenosine-3'-phosphate
  modified_base 15: mod_base = OTHER; note = 2'-O-methylguanosine-3'-phosphate
  modified_base 16: mod_base = OTHER; note = 2'-deoxy-2'-fluoroguanosine-3'-phosphate
  modified_base 17: mod_base = OTHER; note = 2'-O-methyladenosine-3'-phosphate
  modified_base 18: mod_base = OTHER; note = 2'-O-methyluridine-3'-phosphate
  modified_base 19: mod_base = OTHER; note = 2'-O-methyluridine-3'-phosphate
  modified_base 20: mod_base = OTHER; note = 2'-O-methylguanosine-3'-phosphate
  modified_base 21: mod_base = OTHER; note = 2'-O-methyluridine-3'-phosphorothioate
  modified_base 22: mod_base = OTHER; note = 2'-O-methylcytidine-3'-phosphorothioate
  modified_base 23: mod_base = OTHER; note = 2'-O-methyladenosine
ttaggatgtcagcaggattgtca

SEQ ID NO: 428 - RNA, 23 nt, synthetic construct
  source 1..23: mol_type = other RNA
  modified_base 1: mod_base = OTHER; note = 2'-O-methyluridine-3'-phosphorothioate 5'-(E)-Vinylphosphonate
  modified_base 2: mod_base = OTHER; note = 2'-deoxy-2'-fluorocytidine-3'-phosphorothioate
  modified_base 3: mod_base = OTHER; note = 2'-O-methyladenosine-3'-phosphate
  modified_base 4: mod_base = OTHER; note = 2'-O-methylguanosine-3'-phosphate
  modified_base 5: mod_base = OTHER; note = 2'-O-methylcytidine-3'-phosphate
  modified_base 6: mod_base = OTHER; note = 2'-deoxy-2'-fluoroadenosine-3'-phosphate
  modified_base 7: mod_base = OTHER; note = 2'-O-methyladenosine-3'-phosphate
  modified_base 8: mod_base = OTHER; note = 2'-deoxy-2'-fluorouridine-3'-phosphate
  modified_base 9: mod_base = OTHER; note = 2'-deoxy-2'-fluoroguanosine-3'-phosphate
  modified_base 10: mod_base = OTHER; note = 2'-O-methyladenosine-3'-phosphate
  modified_base 11: mod_base = OTHER; note = 2'-O-methylcytidine-3'-phosphate
  modified_base 12: mod_base = OTHER; note = 2'-O-methyluridine-3'-phosphate
  modified_base 13: mod_base = OTHER; note = 2'-O-methyladenosine-3'-phosphate
  modified_base 14: mod_base = OTHER; note = 2'-deoxy-2'-fluoroguanosine-3'-phosphate
  modified_base 15: mod_base = OTHER; note = 2'-O-methylguanosine-3'-phosphate
  modified_base 16: mod_base = OTHER; note = 2'-deoxy-2'-fluoroadenosine-3'-phosphate
  modified_base 17: mod_base = OTHER; note = 2'-O-methyluridine-3'-phosphate
  modified_base 18: mod_base = OTHER; note = 2'-O-methylguanosine-3'-phosphate
  modified_base 19: mod_base = OTHER; note = 2'-O-methyluridine-3'-phosphate
  modified_base 20: mod_base = OTHER; note = 2'-O-methylcytidine-3'-phosphate
  modified_base 21: mod_base = OTHER; note = 2'-O-methyladenosine-3'-phosphorothioate
  modified_base 22: mod_base = OTHER; note = 2'-O-methylguanosine-3'-phosphorothioate
  modified_base 23: mod_base = OTHER; note = 2'-O-methylcytidine
tcagcaatgactaggatgtcagc

SEQ ID NO: 429 - RNA, 23 nt, synthetic construct
  source 1..23: mol_type = other RNA
  modified_base 1: mod_base = OTHER; note = 2'-O-methyluridine-3'-phosphorothioate 5'-(E)-Vinylphosphonate
  modified_base 2: mod_base = OTHER; note = 2'-deoxy-2'-fluoroadenosine-3'-phosphorothioate
  modified_base 3: mod_base = OTHER; note = 2'-O-methylguanosine-3'-phosphate
  modified_base 4: mod_base = OTHER; note = 2'-O-methylguanosine-3'-phosphate
  modified_base 5: mod_base = OTHER; note = 2'-O-methyladenosine-3'-phosphate
  modified_base 6: mod_base = OTHER; note = 2'-deoxy-2'-fluoroadenosine-3'-phosphate
  modified_base 7: mod_base = OTHER; note = 2'-O-methyladenosine-3'-phosphate
  modified_base 8: mod_base = OTHER; note = 2'-deoxy-2'-fluorouridine-3'-phosphate
  modified_base 9: mod_base = OTHER; note = 2'-deoxy-2'-fluoroadenosine-3'-phosphate
  modified_base 10: mod_base = OTHER; note = 2'-O-methyluridine-3'-phosphate
  modified_base 11: mod_base = OTHER; note = 2'-O-methylguanosine-3'-phosphate
  modified_base 12: mod_base = OTHER; note = 2'-O-methylcytidine-3'-phosphate
  modified_base 13: mod_base = OTHER; note = 2'-O-methyladenosine-3'-phosphate
  modified_base 14: mod_base = OTHER; note = 2'-deoxy-2'-fluoroguanosine-3'-phosphate
  modified_base 15: mod_base = OTHER; note = 2'-O-methylcytidine-3'-phosphate
  modified_base 16: mod_base = OTHER; note = 2'-deoxy-2'-fluoroadenosine-3'-phosphate
  modified_base 17: mod_base = OTHER; note = 2'-O-methyladenosine-3'-phosphate
  modified_base 18: mod_base = OTHER; note = 2'-O-methyluridine-3'-phosphate
  modified_base 19: mod_base = OTHER; note = 2'-O-methylguanosine-3'-phosphate
  modified_base 20: mod_base = OTHER; note = 2'-O-methyladenosine-3'-phosphate
  modified_base 21: mod_base = OTHER; note = 2'-O-methylcytidine-3'-phosphorothioate
  modified_base 22: mod_base = OTHER; note = 2'-O-methyluridine-3'-phosphorothioate
  modified_base 23: mod_base = OTHER; note = 2'-O-methyladenosine
taggaaatatgcagcaatgacta

SEQ ID NO: 430 - RNA, 23 nt, synthetic construct
  source 1..23: mol_type = other RNA
  modified_base 1: mod_base = OTHER; note = 2'-O-methyluridine-3'-phosphorothioate 5'-(E)-Vinylphosphonate
  modified_base 2: mod_base = OTHER; note = 2'-deoxy-2'-fluoroadenosine-3'-phosphorothioate
  modified_base 3: mod_base = OTHER; note = 2'-O-methyluridine-3'-phosphate
  modified_base 4: mod_base = OTHER; note = 2'-O-methylguanosine-3'-phosphate
  modified_base 5: mod_base = OTHER; note = 2'-O-methyladenosine-3'-phosphate
  modified_base 6: mod_base = OTHER; note = 2'-deoxy-2'-fluorocytidine-3'-phosphate
  modified_base 7: mod_base = OTHER; note = 2'-O-methylcytidine-3'-phosphate
  modified_base 8: mod_base = OTHER; note = 2'-deoxy-2'-fluoroadenosine-3'-phosphate
  modified_base 9: mod_base = OTHER; note = 2'-deoxy-2'-fluoroguanosine-3'-phosphate
  modified_base 10: mod_base = OTHER; note = 2'-O-methylcytidine-3'-phosphate
  modified_base 11: mod_base = OTHER; note = 2'-O-methyladenosine-3'-phosphate
  modified_base 12: mod_base = OTHER; note = 2'-O-methylguanosine-3'-phosphate
  modified_base 13: mod_base = OTHER; note = 2'-O-methylguanosine-3'-phosphate
  modified_base 14: mod_base = OTHER; note = 2'-deoxy-2'-fluoroadenosine-3'-phosphate
  modified_base 15: mod_base = OTHER; note = 2'-O-methyladenosine-3'-phosphate
  modified_base 16: mod_base = OTHER; note = 2'-deoxy-2'-fluoroadenosine-3'-phosphate
  modified_base 17: mod_base = OTHER; note = 2'-O-methyluridine-3'-phosphate
  modified_base 18: mod_base = OTHER; note = 2'-O-methyladenosine-3'-phosphate
  modified_base 19: mod_base = OTHER; note = 2'-O-methyluridine-3'-phosphate
  modified_base 20: mod_base = OTHER; note = 2'-O-methylguanosine-3'-phosphate
  modified_base 21: mod_base = OTHER; note = 2'-O-methylcytidine-3'-phosphorothioate
  modified_base 22: mod_base = OTHER; note = 2'-O-methyladenosine-3'-phosphorothioate
  modified_base 23: mod_base = OTHER; note = 2'-O-methylguanosine
tatgaccagcaggaaatatgcag

SEQ ID NO: 431 - RNA, 23 nt, synthetic construct
  source 1..23: mol_type = other RNA
  modified_base 1: mod_base = OTHER; note = 2'-O-methyluridine-3'-phosphorothioate 5'-(E)-Vinylphosphonate
  modified_base 2: mod_base = OTHER; note = 2'-deoxy-2'-fluorocytidine-3'-phosphorothioate
  modified_base 3: mod_base = OTHER; note = 2'-O-methylcytidine-3'-phosphate
  modified_base 4: mod_base = OTHER; note = 2'-O-methyladenosine-3'-phosphate
  modified_base 5: mod_base = OTHER; note = 2'-O-methyladenosine-3'-phosphate
  modified_base 6: mod_base = OTHER; note = 2'-deoxy-2'-fluorocytidine-3'-phosphate
  modified_base 7: mod_base = OTHER; note = 2'-O-methylguanosine-3'-phosphate
  modified_base 8: mod_base = OTHER; note = 2'-deoxy-2'-fluorocytidine-3'-phosphate
  modified_base 9: mod_base = OTHER; note = 2'-deoxy-2'-fluorocytidine-3'-phosphate
  modified_base 10: mod_base = OTHER; note = 2'-O-methyladenosine-3'-phosphate
  modified_base 11: mod_base = OTHER; note = 2'-O-methyladenosine-3'-phosphate
  modified_base 12: mod_base = OTHER; note = 2'-O-methyluridine-3'-phosphate
  modified_base 13: mod_base = OTHER; note = 2'-O-methylguanosine-3'-phosphate
  modified_base 14: mod_base = OTHER; note = 2'-deoxy-2'-fluoroadenosine-3'-phosphate
  modified_base 15: mod_base = OTHER; note = 2'-O-methylcytidine-3'-phosphate
  modified_base 16: mod_base = OTHER; note = 2'-deoxy-2'-fluorocytidine-3'-phosphate
  modified_base 17: mod_base = OTHER; note = 2'-O-methyladenosine-3'-phosphate
  modified_base 18: mod_base = OTHER; note = 2'-O-methylguanosine-3'-phosphate
  modified_base 19: mod_base = OTHER; note = 2'-O-methylcytidine-3'-phosphate
  modified_base 20: mod_base = OTHER; note = 2'-O-methyladenosine-3'-phosphate
  modified_base 21: mod_base = OTHER; note = 2'-O-methylguanosine-3'-phosphorothioate
  modified_base 22: mod_base = OTHER; note = 2'-O-methylguanosine-3'-phosphorothioate
  modified_base 23: mod_base = OTHER; note = 2'-O-methyladenosine
tccaacgccaatgaccagcagga

SEQ ID NO: 432 - RNA, 23 nt, synthetic construct
  source 1..23: mol_type = other RNA
  modified_base 1: mod_base = OTHER; note = 2'-O-methyluridine-3'-phosphorothioate 5'-(E)-Vinylphosphonate
  modified_base 2: mod_base = OTHER; note = 2'-deoxy-2'-fluorouridine-3'-phosphorothioate
  modified_base 3: mod_base = OTHER; note = 2'-O-methylguanosine-3'-phosphate
  modified_base 4: mod_base = OTHER; note = 2'-O-methylguanosine-3'-phosphate
  modified_base 5: mod_base = OTHER; note = 2'-O-methyladenosine-3'-phosphate
  modified_base 6: mod_base = OTHER; note = 2'-deoxy-2'-fluorocytidine-3'-phosphate
  modified_base 7: mod_base = OTHER; note = 2'-O-methylcytidine-3'-phosphate
  modified_base 8: mod_base = OTHER; note = 2'-deoxy-2'-fluoroadenosine-3'-phosphate
  modified_base 9: mod_base = OTHER; note = 2'-deoxy-2'-fluorocytidine-3'-phosphate
  modified_base 10: mod_base = OTHER; note = 2'-O-methyladenosine-3'-phosphate
  modified_base 11: mod_base = OTHER; note = 2'-O-methyladenosine-3'-phosphate
  modified_base 12: mod_base = OTHER; note = 2'-O-methylguanosine-3'-phosphate
  modified_base 13: mod_base = OTHER; note = 2'-O-methylcytidine-3'-phosphate
  modified_base 14: mod_base = OTHER; note = 2'-deoxy-2'-fluorocytidine-3'-phosphate
  modified_base 15: mod_base = OTHER; note = 2'-O-methyladenosine-3'-phosphate
  modified_base 16: mod_base = OTHER; note = 2'-deoxy-2'-fluoroadenosine-3'-phosphate
  modified_base 17: mod_base = OTHER; note = 2'-O-methylcytidine-3'-phosphate
  modified_base 18: mod_base = OTHER; note = 2'-O-methylguanosine-3'-phosphate
  modified_base 19: mod_base = OTHER; note = 2'-O-methylcytidine-3'-phosphate
  modified_base 20: mod_base = OTHER; note = 2'-O-methylcytidine-3'-phosphate
  modified_base 21: mod_base = OTHER; note = 2'-O-methyladenosine-3'-phosphorothioate
  modified_base 22: mod_base = OTHER; note = 2'-O-methyladenosine-3'-phosphorothioate
  modified_base 23: mod_base = OTHER; note = 2'-O-methyluridine
ttggaccacaagccaacgccaat

SEQ ID NO: 433 - RNA, 23 nt, synthetic construct
  source 1..23: mol_type = other RNA
  modified_base 1: mod_base = OTHER; note = 2'-O-methyluridine-3'-phosphorothioate 5'-(E)-Vinylphosphonate
  modified_base 2: mod_base = OTHER; note = 2'-deoxy-2'-fluorouridine-3'-phosphorothioate
  modified_base 3: mod_base = OTHER; note = 2'-O-methylguanosine-3'-phosphate
  modified_base 4: mod_base = OTHER; note = 2'-O-methyluridine-3'-phosphate
  modified_base 5: mod_base = OTHER; note = 2'-O-methyluridine-3'-phosphate
  modified_base 6: mod_base = OTHER; note = 2'-deoxy-2'-fluoroguanosine-3'-phosphate
  modified_base 7: mod_base = OTHER; note = 2'-O-methylguanosine-3'-phosphate
  modified_base 8: mod_base = OTHER; note = 2'-deoxy-2'-fluorouridine-3'-phosphate
  modified_base 9: mod_base = OTHER; note = 2'-deoxy-2'-fluorouridine-3'-phosphate
  modified_base 10: mod_base = OTHER; note = 2'-O-methylcytidine-3'-phosphate
  modified_base 11: mod_base = OTHER; note = 2'-O-methyluridine-3'-phosphate
  modified_base 12: mod_base = OTHER; note = 2'-O-methylguanosine-3'-phosphate
  modified_base 13: mod_base = OTHER; note = 2'-O-methylcytidine-3'-phosphate
  modified_base 14: mod_base = OTHER; note = 2'-deoxy-2'-fluoroadenosine-3'-phosphate
  modified_base 15: mod_base = OTHER; note = 2'-O-methylcytidine-3'-phosphate
  modified_base 16: mod_base = OTHER; note = 2'-deoxy-2'-fluoroadenosine-3'-phosphate
  modified_base 17: mod_base = OTHER; note = 2'-O-methyluridine-3'-phosphate
  modified_base 18: mod_base = OTHER; note = 2'-O-methylguanosine-3'-phosphate
  modified_base 19: mod_base = OTHER; note = 2'-O-methylguanosine-3'-phosphate
  modified_base 20: mod_base = OTHER; note = 2'-O-methyladenosine-3'-phosphate
  modified_base 21: mod_base = OTHER; note = 2'-O-methylcytidine-3'-phosphorothioate
  modified_base 22: mod_base = OTHER; note = 2'-O-methylcytidine-3'-phosphorothioate
  modified_base 23: mod_base = OTHER; note = 2'-O-methyladenosine
ttgttggttctgcacatggacca

SEQ ID NO: 434 - RNA, 23 nt, synthetic construct
  source 1..23: mol_type = other RNA
  modified_base 1: mod_base = OTHER; note = 2'-O-methyluridine-3'-phosphorothioate 5'-(E)-Vinylphosphonate
  modified_base 2: mod_base = OTHER; note = 2'-deoxy-2'-fluorocytidine-3'-phosphorothioate
  modified_base 3: mod_base = OTHER; note = 2'-O-methyladenosine-3'-phosphate
  modified_base 4: mod_base = OTHER; note = 2'-O-methylguanosine-3'-phosphate
  modified_base 5: mod_base = OTHER; note = 2'-O-methyluridine-3'-phosphate
  modified_base 6: mod_base = OTHER; note = 2'-deoxy-2'-fluoroguanosine-3'-phosphate
  modified_base 7: mod_base = OTHER; note = 2'-O-methylcytidine-3'-phosphate
  modified_base 8: mod_base = OTHER; note = 2'-deoxy-2'-fluorocytidine-3'-phosphate
  modified_base 9: mod_base = OTHER; note = 2'-deoxy-2'-fluorouridine-3'-phosphate
  modified_base 10: mod_base = OTHER; note = 2'-O-methylcytidine-3'-phosphate
  modified_base 11: mod_base = OTHER; note = 2'-O-methyluridine-3'-phosphate
  modified_base 12: mod_base = OTHER; note = 2'-O-methylguanosine-3'-phosphate
  modified_base 13: mod_base = OTHER; note = 2'-O-methyluridine-3'-phosphate
  modified_base 14: mod_base = OTHER; note = 2'-deoxy-2'-fluorouridine-3'-phosphate
  modified_base 15: mod_base = OTHER; note = 2'-O-methylguanosine-3'-phosphate
  modified_base 16: mod_base = OTHER; note = 2'-deoxy-2'-fluoroguanosine-3'-phosphate
  modified_base 17: mod_base = OTHER; note = 2'-O-methyluridine-3'-phosphate
  modified_base 18: mod_base = OTHER; note = 2'-O-methyluridine-3'-phosphate
  modified_base 19: mod_base = OTHER; note = 2'-O-methylcytidine-3'-phosphate
  modified_base 20: mod_base = OTHER; note = 2'-O-methyluridine-3'-phosphate
  modified_base 21: mod_base = OTHER; note = 2'-O-methylguanosine-3'-phosphorothioate
  modified_base 22: mod_base = OTHER; note = 2'-O-methylcytidine-3'-phosphorothioate
  modified_base 23: mod_base = OTHER; note = 2'-O-methyladenosine
tcagtgcctctgttggttctgca

SEQ ID NO: 435 - RNA, 23 nt, synthetic construct
  source 1..23: mol_type = other RNA
  modified_base 1: mod_base = OTHER; note = 2'-O-methyluridine-3'-phosphorothioate 5'-(E)-Vinylphosphonate
  modified_base 2: mod_base = OTHER; note = 2'-deoxy-2'-fluorouridine-3'-phosphorothioate
  modified_base 3: mod_base = OTHER; note = 2'-O-methyladenosine-3'-phosphate
  modified_base 4: mod_base = OTHER; note = 2'-O-methylguanosine-3'-phosphate
  modified_base 5: mod_base = OTHER; note = 2'-O-methylcytidine-3'-phosphate
  modified_base 6: mod_base = OTHER; note = 2'-deoxy-2'-fluorocytidine-3'-phosphate
  modified_base 7: mod_base = OTHER; note = 2'-O-methylguanosine-3'-phosphate
  modified_base 8: mod_base = OTHER; note = 2'-deoxy-2'-fluorocytidine-3'-phosphate
  modified_base 9: mod_base = OTHER; note = 2'-deoxy-2'-fluorocytidine-3'-phosphate
  modified_base 10: mod_base = OTHER; note = 2'-O-methylcytidine-3'-phosphate
  modified_base 11: mod_base = OTHER; note = 2'-O-methyladenosine-3'-phosphate
  modified_base 12: mod_base = OTHER; note = 2'-O-methylcytidine-3'-phosphate
  modified_base 13: mod_base = OTHER; note = 2'-O-methyladenosine-3'-phosphate
  modified_base 14: mod_base = OTHER; note = 2'-deoxy-2'-fluoroguanosine-3'-phosphate
  modified_base 15: mod_base = OTHER; note = 2'-O-methyluridine-3'-phosphate
  modified_base 16: mod_base = OTHER; note = 2'-deoxy-2'-fluoroguanosine-3'-phosphate
  modified_base 17: mod_base = OTHER; note = 2'-O-methylcytidine-3'-phosphate
  modified_base 18: mod_base = OTHER; note = 2'-O-methylcytidine-3'-phosphate
  modified_base 19: mod_base = OTHER; note = 2'-O-methyluridine-3'-phosphate
  modified_base 20: mod_base = OTHER; note = 2'-O-methylcytidine-3'-phosphate
  modified_base 21: mod_base = OTHER; note = 2'-O-methyluridine-3'-phosphorothioate
  modified_base 22: mod_base = OTHER; note = 2'-O-methylguanosine-3'-phosphorothioate
  modified_base 23: mod_base = OTHER; note = 2'-O-methyluridine
ttagccgcccacagtgcctctgt

SEQ ID NO: 436 - RNA, 23 nt, synthetic construct
  source 1..23: mol_type = other RNA
  modified_base 1: mod_base = OTHER; note = 2'-O-methyluridine-3'-phosphorothioate 5'-(E)-Vinylphosphonate
  modified_base 2: mod_base = OTHER; note = 2'-deoxy-2'-fluorouridine-3'-phosphorothioate
  modified_base 3: mod_base = OTHER; note = 2'-O-methylguanosine-3'-phosphate
  modified_base 4: mod_base = OTHER; note = 2'-O-methylcytidine-3'-phosphate
  modified_base 5: mod_base = OTHER; note = 2'-O-methylcytidine-3'-phosphate
  modified_base 6: mod_base = OTHER; note = 2'-deoxy-2'-fluoroadenosine-3'-phosphate
  modified_base 7: mod_base = OTHER; note = 2'-O-methylguanosine-3'-phosphate
  modified_base 8: mod_base = OTHER; note = 2'-deoxy-2'-fluoroguanosine-3'-phosphate
  modified_base 9: mod_base = OTHER; note = 2'-deoxy-2'-fluoroadenosine-3'-phosphate
  modified_base 10: mod_base = OTHER; note = 2'-O-methyladenosine-3'-phosphate
  modified_base 11: mod_base = OTHER; note = 2'-O-methylguanosine-3'-phosphate
  modified_base 12: mod_base = OTHER; note = 2'-O-methyluridine-3'-phosphate
  modified_base 13: mod_base = OTHER; note = 2'-O-methyladenosine-3'-phosphate
  modified_base 14: mod_base = OTHER; note = 2'-deoxy-2'-fluoroguanosine-3'-phosphate
  modified_base 15: mod_base = OTHER; note = 2'-O-methylcytidine-3'-phosphate
  modified_base 16: mod_base = OTHER; note = 2'-deoxy-2'-fluorocytidine-3'-phosphate
  modified_base 17: mod_base = OTHER; note = 2'-O-methylguanosine-3'-phosphate
  modified_base 18: mod_base = OTHER; note = 2'-O-methylcytidine-3'-phosphate
  modified_base 19: mod_base = OTHER; note = 2'-O-methylcytidine-3'-phosphate
  modified_base 20: mod_base = OTHER; note = 2'-O-methylcytidine-3'-phosphate
  modified_base 21: mod_base = OTHER; note = 2'-O-methyladenosine-3'-phosphorothioate
  modified_base 22: mod_base = OTHER; note = 2'-O-methylcytidine-3'-phosphorothioate
  modified_base 23: mod_base = OTHER; note = 2'-O-methyladenosine
ttgccaggaagtagccgcccaca

SEQ ID NO: 437 - RNA, 23 nt, synthetic construct
  source 1..23: mol_type = other RNA
  modified_base 1: mod_base = OTHER; note = 2'-O-methyluridine-3'-phosphorothioate 5'-(E)-Vinylphosphonate
  modified_base 2: mod_base = OTHER; note = 2'-deoxy-2'-fluorouridine-3'-phosphorothioate
  modified_base 3: mod_base = OTHER; note = 2'-O-methylguanosine-3'-phosphate
  modified_base 4: mod_base = OTHER; note = 2'-O-methylcytidine-3'-phosphate
  modified_base 5: mod_base = OTHER; note = 2'-O-methyluridine-3'-phosphate
  modified_base 6: mod_base = OTHER; note = 2'-deoxy-2'-fluoroguanosine-3'-phosphate
  modified_base 7: mod_base = OTHER; note = 2'-O-methylcytidine-3'-phosphate
  modified_base 8: mod_base = OTHER; note = 2'-deoxy-2'-fluoroguanosine-3'-phosphate
  modified_base 9: mod_base = OTHER; note = 2'-deoxy-2'-fluorouridine-3'-phosphate
  modified_base 10: mod_base = OTHER; note = 2'-O-methylcytidine-3'-phosphate
  modified_base 11: mod_base = OTHER; note = 2'-O-methylcytidine-3'-phosphate
  modified_base 12: mod_base = OTHER; note = 2'-O-methyluridine-3'-phosphate
  modified_base 13: mod_base = OTHER; note = 2'-O-methylguanosine-3'-phosphate
  modified_base 14: mod_base = OTHER; note = 2'-deoxy-2'-fluorocytidine-3'-phosphate
  modified_base 15: mod_base = OTHER; note = 2'-O-methylcytidine-3'-phosphate
  modified_base 16: mod_base = OTHER; note = 2'-deoxy-2'-fluoroadenosine-3'-phosphate
  modified_base 17: mod_base = OTHER; note = 2'-O-methylguanosine-3'-phosphate
  modified_base 18: mod_base = OTHER; note = 2'-O-methylguanosine-3'-phosphate
  modified_base 19: mod_base = OTHER; note = 2'-O-methyladenosine-3'-phosphate
  modified_base 20: mod_base = OTHER; note = 2'-O-methyladenosine-3'-phosphate
  modified_base 21: mod_base = OTHER; note = 2'-O-methylguanosine-3'-phosphorothioate
  modified_base 22: mod_base = OTHER; note = 2'-O-methyluridine-3'-phosphorothioate
  modified_base 23: mod_base = OTHER; note = 2'-O-methyladenosine
ttgctgcgtcctgccaggaagta

SEQ ID NO: 438 - RNA, 23 nt, synthetic construct
  source 1..23: mol_type = other RNA
  modified_base 1: mod_base = OTHER; note = 2'-O-methyluridine-3'-phosphorothioate 5'-(E)-Vinylphosphonate
  modified_base 2: mod_base = OTHER; note = 2'-deoxy-2'-fluoroadenosine-3'-phosphorothioate
  modified_base 3: mod_base = OTHER; note = 2'-O-methylcytidine-3'-phosphate
  modified_base 4: mod_base = OTHER; note = 2'-O-methylcytidine-3'-phosphate
  modified_base 5: mod_base = OTHER; note = 2'-O-methyladenosine-3'-phosphate
  modified_base 6: mod_base = OTHER; note = 2'-deoxy-2'-fluorocytidine-3'-phosphate
  modified_base 7: mod_base = OTHER; note = 2'-O-methyladenosine-3'-phosphate
  modified_base 8: mod_base = OTHER; note = 2'-deoxy-2'-fluorocytidine-3'-phosphate
  modified_base 9: mod_base = OTHER; note = 2'-deoxy-2'-fluorocytidine-3'-phosphate
  modified_base 10: mod_base = OTHER; note = 2'-O-methyladenosine-3'-phosphate
  modified_base 11: mod_base = OTHER; note = 2'-O-methyluridine-3'-phosphate
  modified_base 12: mod_base = OTHER; note = 2'-O-methylguanosine-3'-phosphate
  modified_base 13: mod_base = OTHER; note = 2'-O-methylcytidine-3'-phosphate
  modified_base 14: mod_base = OTHER; note = 2'-deoxy-2'-fluorouridine-3'-phosphate
  modified_base 15: mod_base = OTHER; note = 2'-O-methylguanosine-3'-phosphate
  modified_base 16: mod_base = OTHER; note = 2'-deoxy-2'-fluorocytidine-3'-phosphate
  modified_base 17: mod_base = OTHER; note = 2'-O-methylguanosine-3'-phosphate
  modified_base 18: mod_base = OTHER; note = 2'-O-methyluridine-3'-phosphate
  modified_base 19: mod_base = OTHER; note = 2'-O-methylcytidine-3'-phosphate
  modified_base 20: mod_base = OTHER; note = 2'-O-methylcytidine-3'-phosphate
  modified_base 21: mod_base = OTHER; note = 2'-O-methyluridine-3'-phosphorothioate
  modified_base 22: mod_base = OTHER; note = 2'-O-methylguanosine-3'-phosphorothioate
  modified_base 23: mod_base = OTHER; note = 2'-O-methylcytidine
taccacaccatgctgcgtcctgc

SEQ ID NO: 439 - RNA, 23 nt, synthetic construct
  source 1..23: mol_type = other RNA
  modified_base 1: mod_base = OTHER; note = 2'-O-methyluridine-3'-phosphorothioate 5'-(E)-Vinylphosphonate
  modified_base 2: mod_base = OTHER; note = 2'-deoxy-2'-fluoroguanosine-3'-phosphorothioate
  modified_base 3: mod_base = OTHER; note = 2'-O-methyluridine-3'-phosphate
  modified_base 4: mod_base = OTHER; note = 2'-O-methyluridine-3'-phosphate
  modified_base 5: mod_base = OTHER; note = 2'-O-methylguanosine-3'-phosphate
  modified_base 6: mod_base = OTHER; note = 2'-deoxy-2'-fluorocytidine-3'-phosphate
  modified_base 7: mod_base = OTHER; note = 2'-O-methyluridine-3'-phosphate
  modified_base 8: mod_base = OTHER; note = 2'-deoxy-2'-fluoroguanosine-3'-phosphate
  modified_base 9: mod_base = OTHER; note = 2'-deoxy-2'-fluoroguanosine-3'-phosphate
  modified_base 10: mod_base = OTHER; note = 2'-O-methylcytidine-3'-phosphate
  modified_base 11: mod_base = OTHER; note = 2'-O-methylguanosine-3'-phosphate
  modified_base 12: mod_base = OTHER; note = 2'-O-methyladenosine-3'-phosphate
  modified_base 13: mod_base = OTHER; note = 2'-O-methyladenosine-3'-phosphate
  modified_base 14: mod_base = OTHER; note = 2'-deoxy-2'-fluoroguanosine-3'-phosphate
  modified_base 15: mod_base = OTHER; note = 2'-O-methyladenosine-3'-phosphate
  modified_base 16: mod_base = OTHER; note = 2'-deoxy-2'-fluoroguanosine-3'-phosphate
  modified_base 17: mod_base = OTHER; note = 2'-O-methyladenosine-3'-phosphate
  modified_base 18: mod_base = OTHER; note = 2'-O-methylguanosine-3'-phosphate
  modified_base 19: mod_base = OTHER; note = 2'-O-methyladenosine-3'-phosphate
  modified_base 20: mod_base = OTHER; note = 2'-O-methylguanosine-3'-phosphate
  modified_base 21: mod_base = OTHER; note = 2'-O-methylguanosine-3'-phosphorothioate
  modified_base 22: mod_base = OTHER; note = 2'-O-methylcytidine-3'-phosphorothioate
  modified_base 23: mod_base = OTHER; note = 2'-O-methylcytidine
tgttgctggcgaagagagaggcc

SEQ ID NO: 440 - RNA, 23 nt, synthetic construct
  source 1..23: mol_type = other RNA
  modified_base 1: mod_base = OTHER; note = 2'-O-methyluridine-3'-phosphorothioate 5'-(E)-Vinylphosphonate
  modified_base 2: mod_base = OTHER; note = 2'-deoxy-2'-fluoroadenosine-3'-phosphorothioate
  modified_base 3: mod_base = OTHER; note = 2'-O-methylcytidine-3'-phosphate
  modified_base 4: mod_base = OTHER; note = 2'-O-methyluridine-3'-phosphate
  modified_base 5: mod_base = OTHER; note = 2'-O-methylguanosine-3'-phosphate
  modified_base 6: mod_base = OTHER; note = 2'-deoxy-2'-fluorocytidine-3'-phosphate
  modified_base 7: mod_base = OTHER; note = 2'-O-methylcytidine-3'-phosphate
  modified_base 8: mod_base = OTHER; note = 2'-deoxy-2'-fluoroguanosine-3'-phosphate
  modified_base 9: mod_base = OTHER; note = 2'-deoxy-2'-fluoroadenosine-3'-phosphate
  modified_base 10: mod_base = OTHER; note = 2'-O-methyluridine-3'-phosphate
  modified_base 11: mod_base = OTHER; note = 2'-O-methylguanosine-3'-phosphate
  modified_base 12: mod_base = OTHER; note = 2'-O-methyluridine-3'-phosphate
  modified_base 13: mod_base = OTHER; note = 2'-O-methyluridine-3'-phosphate
  modified_base 14: mod_base = OTHER; note = 2'-deoxy-2'-fluoroguanosine-3'-phosphate
  modified_base 15: mod_base = OTHER; note = 2'-O-methylcytidine-3'-phosphate
  modified_base 16: mod_base = OTHER; note = 2'-deoxy-2'-fluorouridine-3'-phosphate
  modified_base 17: mod_base = OTHER; note = 2'-O-methylguanosine-3'-phosphate
  modified_base 18: mod_base = OTHER; note = 2'-O-methylguanosine-3'-phosphate
  modified_base 19: mod_base = OTHER; note = 2'-O-methylcytidine-3'-phosphate
  modified_base 20: mod_base = OTHER; note = 2'-O-methylguanosine-3'-phosphate
  modified_base 21: mod_base = OTHER; note = 2'-O-methyladenosine-3'-phosphorothioate
  modified_base 22: mod_base = OTHER; note = 2'-O-methyladenosine-3'-phosphorothioate
  modified_base 23: mod_base = OTHER; note = 2'-O-methylguanosine
tactgccgatgttgctggcgaag

SEQ ID NO: 441 - RNA, 23 nt, synthetic construct
  source 1..23: mol_type = other RNA
  modified_base 1: mod_base = OTHER; note = 2'-O-methyluridine-3'-phosphorothioate 5'-(E)-Vinylphosphonate
  modified_base 2: mod_base = OTHER; note = 2'-deoxy-2'-fluorocytidine-3'-phosphorothioate
  modified_base 3: mod_base = OTHER; note = 2'-O-methyladenosine-3'-phosphate
  modified_base 4: mod_base = OTHER; note = 2'-O-methyladenosine-3'-phosphate
  modified_base 5: mod_base = OTHER; note = 2'-O-methyladenosine-3'-phosphate
  modified_base 6: mod_base = OTHER; note = 2'-deoxy-2'-fluoroguanosine-3'-phosphate
  modified_base 7: mod_base = OTHER; note = 2'-O-methyluridine-3'-phosphate
  modified_base 8: mod_base = OTHER; note = 2'-deoxy-2'-fluoroguanosine-3'-phosphate
  modified_base 9: mod_base = OTHER; note = 2'-deoxy-2'-fluoroguanosine-3'-phosphate
  modified_base 10: mod_base = OTHER; note = 2'-O-methylcytidine-3'-phosphate
  modified_base 11: mod_base = OTHER; note = 2'-O-methylcytidine-3'-phosphate
  modified_base 12: mod_base = OTHER; note = 2'-O-methyladenosine-3'-phosphate
  modified_base 13: mod_base = OTHER; note = 2'-O-methylcytidine-3'-phosphate
  modified_base 14: mod_base = OTHER; note = 2'-deoxy-2'-fluorouridine-3'-phosphate
  modified_base 15: mod_base = OTHER; note = 2'-O-methylguanosine-3'-phosphate
  modified_base 16: mod_base = OTHER; note = 2'-deoxy-2'-fluorocytidine-3'-phosphate
  modified_base 17: mod_base = OTHER; note = 2'-O-methylcytidine-3'-phosphate
  modified_base 18: mod_base = OTHER; note = 2'-O-methylguanosine-3'-phosphate
  modified_base 19: mod_base = OTHER; note = 2'-O-methyladenosine-3'-phosphate
  modified_base 20: mod_base = OTHER; note = 2'-O-methyluridine-3'-phosphate
  modified_base 21: mod_base = OTHER; note = 2'-O-methylguanosine-3'-phosphorothioate
  modified_base 22: mod_base = OTHER; note = 2'-O-methyluridine-3'-phosphorothioate
  modified_base 23: mod_base = OTHER; note = 2'-O-methyluridine
tcaaagtggccactgccgatgtt

SEQ ID NO: 442 - RNA, 23 nt, synthetic construct
  source 1..23: mol_type = other RNA
  modified_base 1: mod_base = OTHER; note = 2'-O-methyluridine-3'-phosphorothioate 5'-(E)-Vinylphosphonate
  modified_base 2: mod_base = OTHER; note = 2'-deoxy-2'-fluorocytidine-3'-phosphorothioate
  modified_base 3: mod_base = OTHER; note = 2'-O-methylcytidine-3'-phosphate
  modified_base 4: mod_base = OTHER; note = 2'-O-methyladenosine-3'-phosphate
  modified_base 5: mod_base = OTHER; note = 2'-O-methylguanosine-3'-phosphate
  modified_base 6: mod_base = OTHER; note = 2'-deoxy-2'-fluoroguanosine-3'-phosphate
  modified_base 7: mod_base = OTHER; note = 2'-O-methylcytidine-3'-phosphate
  modified_base 8: mod_base = OTHER; note = 2'-deoxy-2'-fluorocytidine-3'-phosphate
  modified_base 9: mod_base = OTHER; note = 2'-deoxy-2'-fluorocytidine-3'-phosphate
  modified_base 10: mod_base = OTHER; note = 2'-O-methyladenosine-3'-phosphate
  modified_base 11: mod_base = OTHER; note = 2'-O-methylcytidine-3'-phosphate
  modified_base 12: mod_base = OTHER; note = 2'-O-methyladenosine-3'-phosphate
  modified_base 13: mod_base = OTHER; note = 2'-O-methyladenosine-3'-phosphate
  modified_base 14: mod_base = OTHER; note = 2'-deoxy-2'-fluoroadenosine-3'-phosphate
  modified_base 15: mod_base = OTHER; note = 2'-O-methylguanosine-3'-phosphate
  modified_base 16: mod_base = OTHER; note = 2'-deoxy-2'-fluorouridine-3'-phosphate
  modified_base 17: mod_base = OTHER; note = 2'-O-methylguanosine-3'-phosphate
  modified_base 18: mod_base = OTHER; note = 2'-O-methylguanosine-3'-phosphate
  modified_base 19: mod_base = OTHER; note = 2'-O-methylcytidine-3'-phosphate
  modified_base 20: mod_base = OTHER; note = 2'-O-methylcytidine-3'-phosphate
  modified_base 21: mod_base = OTHER; note = 2'-O-methyladenosine-3'-phosphorothioate
  modified_base 22: mod_base = OTHER; note = 2'-O-methylcytidine-3'-phosphorothioate
  modified_base 23: mod_base = OTHER; note = 2'-O-methyluridine
tccaggcccacaaagtggccact

SEQ ID NO: 443 - RNA, 23 nt, synthetic construct
  source 1..23: mol_type = other RNA
  modified_base 1: mod_base = OTHER; note = 2'-O-methyluridine-3'-phosphorothioate 5'-(E)-Vinylphosphonate
  modified_base 2: mod_base = OTHER; note = 2'-deoxy-2'-fluoroadenosine-3'-phosphorothioate
  modified_base 3: mod_base = OTHER; note = 2'-O-methyladenosine-3'-phosphate
  modified_base 4: mod_base = OTHER; note = 2'-O-methylcytidine-3'-phosphate
  modified_base 5: mod_base = OTHER; note = 2'-O-methyladenosine-3'-phosphate
  modified_base 6: mod_base = OTHER; note = 2'-deoxy-2'-fluoroguanosine-3'-phosphate
  modified_base 7: mod_base = OTHER; note = 2'-O-methylcytidine-3'-phosphate
  modified_base 8: mod_base = OTHER; note = 2'-deoxy-2'-fluorocytidine-3'-phosphate
  modified_base 9: mod_base = OTHER; note = 2'-deoxy-2'-fluoroadenosine-3'-phosphate
  modified_base 10: mod_base = OTHER; note = 2'-O-methyladenosine-3'-phosphate
  modified_base 11: mod_base = OTHER; note = 2'-O-methylguanosine-3'-phosphate
  modified_base 12: mod_base = OTHER; note = 2'-O-methylcytidine-3'-phosphate
  modified_base 13: mod_base = OTHER; note = 2'-O-methylcytidine-3'-phosphate
  modified_base 14: mod_base = OTHER; note = 2'-deoxy-2'-fluoroadenosine-3'-phosphate
  modified_base 15: mod_base = OTHER; note = 2'-O-methylcytidine-3'-phosphate
  modified_base 16: mod_base = OTHER; note = 2'-deoxy-2'-fluorouridine-3'-phosphate
  modified_base 17: mod_base = OTHER; note = 2'-O-methyluridine-3'-phosphate
  modified_base 18: mod_base = OTHER; note = 2'-O-methylguanosine-3'-phosphate
  modified_base 19: mod_base = OTHER; note = 2'-O-methylcytidine-3'-phosphate
  modified_base 20: mod_base = OTHER; note = 2'-O-methyladenosine-3'-phosphate
  modified_base 21: mod_base = OTHER; note = 2'-O-methylguanosine-3'-phosphorothioate
  modified_base 22: mod_base = OTHER; note = 2'-O-methylcytidine-3'-phosphorothioate
  modified_base 23: mod_base = OTHER; note = 2'-O-methylguanosine
taacagccaagccacttgcagcg

SEQ ID NO: 444 - RNA, 23 nt, synthetic construct
  source 1..23: mol_type = other RNA
  modified_base 1: mod_base = OTHER; note = 2'-O-methyluridine-3'-phosphorothioate 5'-(E)-Vinylphosphonate
  modified_base 2: mod_base = OTHER; note = 2'-deoxy-2'-fluorouridine-3'-phosphorothioate
  modified_base 3: mod_base = OTHER; note = 2'-O-methylcytidine-3'-phosphate
  modified_base 4: mod_base = OTHER; note = 2'-O-methylguanosine-3'-phosphate
  modified_base 5: mod_base = OTHER; note = 2'-O-methyladenosine-3'-phosphate
  modified_base 6: mod_base = OTHER; note = 2'-deoxy-2'-fluoroadenosine-3'-phosphate
  modified_base 7: mod_base = OTHER; note = 2'-O-methyluridine-3'-phosphate
  modified_base 8: mod_base = OTHER; note = 2'-deoxy-2'-fluorocytidine-3'-phosphate
  modified_base 9: mod_base = OTHER; note = 2'-deoxy-2'-fluorocytidine-3'-phosphate
  modified_base 10: mod_base = OTHER; note = 2'-O-methyladenosine-3'-phosphate
  modified_base 11: mod_base = OTHER; note = 2'-O-methylguanosine-3'-phosphate
  modified_base 12: mod_base = OTHER; note = 2'-O-methylcytidine-3'-phosphate
  modified_base 13: mod_base = OTHER; note = 2'-O-methyladenosine-3'-phosphate
  modified_base 14: mod_base = OTHER; note = 2'-deoxy-2'-fluoroadenosine-3'-phosphate
  modified_base 15: mod_base = OTHER; note = 2'-O-methylcytidine-3'-phosphate
  modified_base 16: mod_base = OTHER; note = 2'-deoxy-2'-fluoroadenosine-3'-phosphate
  modified_base 17: mod_base = OTHER; note = 2'-O-methylguanosine-3'-phosphate
  modified_base 18: mod_base = OTHER; note = 2'-O-methylcytidine-3'-phosphate
  modified_base 19: mod_base = OTHER; note = 2'-O-methylcytidine-3'-phosphate
  modified_base 20: mod_base = OTHER; note = 2'-O-methyladenosine-3'-phosphate
  modified_base 21: mod_base = OTHER; note = 2'-O-methyladenosine-3'-phosphorothioate
  modified_base 22: mod_base = OTHER; note = 2'-O-methylguanosine-3'-phosphorothioate
  modified_base 23: mod_base = OTHER; note = 2'-O-methylcytidine
ttcgaatccagcaacagccaagc

SEQ ID NO: 445 - RNA, 23 nt, synthetic construct
  source 1..23: mol_type = other RNA
  modified_base 1: mod_base = OTHER; note = 2'-O-methyluridine-3'-phosphorothioate 5'-(E)-Vinylphosphonate
  modified_base 2: mod_base = OTHER; note = 2'-deoxy-2'-fluorocytidine-3'-phosphorothioate
  modified_base 3: mod_base = OTHER; note = 2'-O-methylguanosine-3'-phosphate
  modified_base 4: mod_base = OTHER; note = 2'-O-methyladenosine-3'-phosphate
  modified_base 5: mod_base = OTHER; note = 2'-O-methyladenosine-3'-phosphate
  modified_base 6: mod_base = OTHER; note = 2'-deoxy-2'-fluoroguanosine-3'-phosphate
  modified_base 7: mod_base = OTHER; note = 2'-O-methyladenosine-3'-phosphate
  modified_base 8: mod_base = OTHER; note = 2'-deoxy-2'-fluoroguanosine-3'-phosphate
  modified_base 9: mod_base = OTHER; note = 2'-deoxy-2'-fluorocytidine-3'-phosphate
  modified_base 10: mod_base = OTHER; note = 2'-O-methylguanosine-3'-phosphate
  modified_base 11: mod_base = OTHER; note = 2'-O-methylcytidine-3'-phosphate
  modified_base 12: mod_base = OTHER; note = 2'-O-methyladenosine-3'-phosphate
  modified_base 13: mod_base = OTHER; note = 2'-O-methyluridine-3'-phosphate
  modified_base 14: mod_base = OTHER; note = 2'-deoxy-2'-fluorouridine-3'-phosphate
  modified_base 15: mod_base = OTHER; note = 2'-O-methylcytidine-3'-phosphate
  modified_base 16: mod_base = OTHER; note = 2'-deoxy-2'-fluorocytidine-3'-phosphate
  modified_base 17: mod_base = OTHER; note = 2'-O-methyladenosine-3'-phosphate
  modified_base 18: mod_base = OTHER; note = 2'-O-methylcytidine-3'-phosphate
  modified_base 19: mod_base = OTHER; note = 2'-O-methyluridine-3'-phosphate
  modified_base 20: mod_base = OTHER; note = 2'-O-methylcytidine-3'-phosphate
  modified_base 21: mod_base = OTHER; note = 2'-O-methylguanosine-3'-phosphorothioate
  modified_base 22: mod_base = OTHER; note = 2'-O-methyladenosine-3'-phosphorothioate
  modified_base 23: mod_base = OTHER; note = 2'-O-methyladenosine
tcgaagagcgcattccactcgaa

SEQ ID NO: 446 - RNA, 23 nt, synthetic construct
  source 1..23: mol_type = other RNA
  modified_base 1: mod_base = OTHER; note = 2'-O-methyluridine-3'-phosphorothioate 5'-(E)-Vinylphosphonate
  modified_base 2: mod_base = OTHER; note = 2'-deoxy-2'-fluoroadenosine-3'-phosphorothioate
  modified_base 3: mod_base = OTHER; note = 2'-O-methylguanosine-3'-phosphate
  modified_base 4: mod_base = OTHER; note = 2'-O-methylcytidine-3'-phosphate
  modified_base 5: mod_base = OTHER; note = 2'-O-methyladenosine-3'-phosphate
  modified_base 6: mod_base = OTHER; note = 2'-deoxy-2'-fluoroguanosine-3'-phosphate
  modified_base 7: mod_base = OTHER; note = 2'-O-methylcytidine-3'-phosphate
  modified_base 8: mod_base = OTHER; note = 2'-deoxy-2'-fluoroadenosine-3'-phosphate
  modified_base 9: mod_base = OTHER; note = 2'-deoxy-2'-fluorocytidine-3'-phosphate
  modified_base 10: mod_base = OTHER; note = 2'-O-methylcytidine-3'-phosphate
  modified_base 11: mod_base = OTHER; note = 2'-O-methyladenosine-3'-phosphate
  modified_base 12: mod_base = OTHER; note = 2'-O-methylcytidine-3'-phosphate
  modified_base 13: mod_base = OTHER; note = 2'-O-methylguanosine-3'-phosphate
  modified_base 14: mod_base = OTHER; note = 2'-deoxy-2'-fluoroadenosine-3'-phosphate
  modified_base 15: mod_base = OTHER; note = 2'-O-methyladenosine-3'-phosphate
  modified_base 16: mod_base = OTHER; note = 2'-deoxy-2'-fluoroguanosine-3'-phosphate
  modified_base 17: mod_base = OTHER; note = 2'-O-methyladenosine-3'-phosphate
  modified_base 18: mod_base = OTHER; note = 2'-O-methylguanosine-3'-phosphate
  modified_base 19: mod_base = OTHER; note = 2'-O-methylcytidine-3'-phosphate
  modified_base 20: mod_base = OTHER; note = 2'-O-methylguanosine-3'-phosphate
  modified_base 21: mod_base = OTHER; note = 2'-O-methylcytidine-3'-phosphorothioate
  modified_base 22: mod_base = OTHER; note = 2'-O-methyladenosine-3'-phosphorothioate
  modified_base 23: mod_base = OTHER; note = 2'-O-methyluridine
tagcagcaccacgaagagcgcat

SEQ ID NO: 447 - RNA, 23 nt, synthetic construct
  source 1..23: mol_type = other RNA
  modified_base 1: mod_base = OTHER; note = 2'-O-methyluridine-3'-phosphorothioate 5'-(E)-Vinylphosphonate
  modified_base 2: mod_base = OTHER; note = 2'-deoxy-2'-fluorocytidine-3'-phosphorothioate
  modified_base 3: mod_base = OTHER; note = 2'-O-methyladenosine-3'-phosphate
  modified_base 4: mod_base = OTHER; note = 2'-O-methylguanosine-3'-phosphate
  modified_base 5: mod_base = OTHER; note = 2'-O-methylcytidine-3'-phosphate
  modified_base 6: mod_base = OTHER; note = 2'-deoxy-2'-fluorocytidine-3'-phosphate
  modified_base 7: mod_base = OTHER; note = 2'-O-methylcytidine-3'-phosphate
  modified_base 8: mod_base = OTHER; note = 2'-deoxy-2'-fluoroadenosine-3'-phosphate
  modified_base 9: mod_base = OTHER; note = 2'-deoxy-2'-fluoroguanosine-3'-phosphate
  modified_base 10: mod_base = OTHER; note = 2'-O-methyluridine-3'-phosphate
  modified_base 11: mod_base = OTHER; note = 2'-O-methyladenosine-3'-phosphate
  modified_base 12: mod_base = OTHER; note = 2'-O-methylguanosine-3'-phosphate
  modified_base 13: mod_base = OTHER; note = 2'-O-methylcytidine-3'-phosphate
  modified_base 14: mod_base = OTHER; note = 2'-deoxy-2'-fluoroadenosine-3'-phosphate
  modified_base 15: mod_base = OTHER; note = 2'-O-methylguanosine-3'-phosphate
  modified_base 16: mod_base = OTHER; note = 2'-deoxy-2'-fluorocytidine-3'-phosphate
  modified_base 17: mod_base = OTHER; note = 2'-O-methyladenosine-3'-phosphate
  modified_base 18: mod_base = OTHER; note = 2'-O-methylcytidine-3'-phosphate
  modified_base 19: mod_base = OTHER; note = 2'-O-methylcytidine-3'-phosphate
  modified_base 20: mod_base = OTHER; note = 2'-O-methyladenosine-3'-phosphate
  modified_base 21: mod_base = OTHER; note = 2'-O-methylcytidine-3'-phosphorothioate
  modified_base 22: mod_base = OTHER; note = 2'-O-methylguanosine-3'-phosphorothioate
  modified_base 23: mod_base = OTHER; note = 2'-O-methyladenosine
tcagcccagtagcagcaccacga

SEQ ID NO: 448 - RNA, 23 nt, synthetic construct
  source 1..23: mol_type = other RNA
  modified_base 1: mod_base = OTHER; note = 2'-O-methyluridine-3'-phosphorothioate 5'-(E)-Vinylphosphonate
  modified_base 2: mod_base = OTHER; note = 2'-deoxy-2'-fluoroguanosine-3'-phosphorothioate
  modified_base 3: mod_base = OTHER; note = 2'-O-methylcytidine-3'-phosphate
  modified_base 4: mod_base = OTHER; note = 2'-O-methyladenosine-3'-phosphate
  modified_base 5: mod_base = OTHER; note = 2'-O-methyladenosine-3'-phosphate
  modified_base 6: mod_base = OTHER; note = 2'-deoxy-2'-fluoroadenosine-3'-phosphate
  modified_base 7: mod_base = OTHER; note = 2'-O-methylcytidine-3'-phosphate
  modified_base 8: mod_base = OTHER; note = 2'-deoxy-2'-fluoroadenosine-3'-phosphate
  modified_base 9: mod_base = OTHER; note = 2'-deoxy-2'-fluoroguanosine-3'-phosphate
  modified_base 10: mod_base = OTHER; note = 2'-O-methylcytidine-3'-phosphate
  modified_base 11: mod_base = OTHER; note = 2'-O-methylcytidine-3'-phosphate
  modified_base 12: mod_base = OTHER; note = 2'-O-methyladenosine-3'-phosphate
  modified_base 13: mod_base = OTHER; note = 2'-O-methylguanosine-3'-phosphate
  modified_base 14: mod_base = OTHER; note = 2'-deoxy-2'-fluorocytidine-3'-phosphate
  modified_base 15: mod_base = OTHER; note = 2'-O-methylcytidine-3'-phosphate
  modified_base 16: mod_base = OTHER; note = 2'-deoxy-2'-fluorocytidine-3'-phosphate
  modified_base 17: mod_base = OTHER; note = 2'-O-methyladenosine-3'-phosphate
  modified_base 18: mod_base = OTHER; note = 2'-O-methylguanosine-3'-phosphate
  modified_base 19: mod_base = OTHER; note = 2'-O-methyluridine-3'-phosphate
  modified_base 20: mod_base = OTHER; note = 2'-O-methyladenosine-3'-phosphate
  modified_base 21: mod_base = OTHER; note = 2'-O-methylguanosine-3'-phosphorothioate
  modified_base 22: mod_base = OTHER; note = 2'-O-methylcytidine-3'-phosphorothioate
  modified_base 23: mod_base = OTHER; note = 2'-O-methyladenosine
tgcaaacagccagcccagtagca

SEQ ID NO: 449 - RNA, 23 nt, synthetic construct
  source 1..23: mol_type = other RNA
  modified_base 1: mod_base = OTHER; note = 2'-O-methyluridine-3'-phosphorothioate 5'-(E)-Vinylphosphonate
  modified_base 2: mod_base = OTHER; note = 2'-deoxy-2'-fluorouridine-3'-phosphorothioate
  modified_base 3: mod_base = OTHER; note = 2'-O-methyladenosine-3'-phosphate
  modified_base 4: mod_base = OTHER; note = 2'-O-methylcytidine-3'-phosphate
  modified_base 5: mod_base = OTHER; note = 2'-O-methyladenosine-3'-phosphate
  modified_base 6: mod_base = OTHER; note = 2'-deoxy-2'-fluorocytidine-3'-phosphate
  modified_base 7: mod_base = OTHER; note = 2'-O-methylguanosine-3'-phosphate
  modified_base 8: mod_base = OTHER; note = 2'-deoxy-2'-fluoroguanosine-3'-phosphate
  modified_base 9: mod_base = OTHER; note = 2'-deoxy-2'-fluoroguanosine-3'-phosphate
  modified_base 10: mod_base = OTHER; note = 2'-O-methyluridine-3'-phosphate
  modified_base 11: mod_base = OTHER; note = 2'-O-methylguanosine-3'-phosphate
  modified_base 12: mod_base = OTHER; note = 2'-O-methylcytidine-3'-phosphate
  modified_base 13: mod_base = OTHER; note = 2'-O-methyladenosine-3'-phosphate
  modified_base 14: mod_base = OTHER; note = 2'-deoxy-2'-fluoroadenosine-3'-phosphate
  modified_base 15: mod_base = OTHER; note = 2'-O-methyladenosine-3'-phosphate
  modified_base 16: mod_base = OTHER; note = 2'-deoxy-2'-fluorocytidine-3'-phosphate
  modified_base 17: mod_base = OTHER; note = 2'-O-methyladenosine-3'-phosphate
  modified_base 18: mod_base = OTHER; note = 2'-O-methylguanosine-3'-phosphate
  modified_base 19: mod_base = OTHER; note = 2'-O-methylcytidine-3'-phosphate
  modified_base 20: mod_base = OTHER; note = 2'-O-methylcytidine-3'-phosphate
  modified_base 21: mod_base = OTHER; note = 2'-O-methyladenosine-3'-phosphorothioate
  modified_base 22: mod_base = OTHER; note = 2'-O-methylguanosine-3'-phosphorothioate
  modified_base 23: mod_base = OTHER; note = 2'-O-methylcytidine
ttacacgggtgcaaacagccagc

SEQ ID NO: 450 - RNA, 23 nt, synthetic construct
  source 1..23: mol_type = other RNA
  modified_base 1: mod_base = OTHER; note = 2'-O-methyluridine-3'-phosphorothioate 5'-(E)-Vinylphosphonate
  modified_base 2: mod_base = OTHER; note = 2'-deoxy-2'-fluorocytidine-3'-phosphorothioate
  modified_base 3: mod_base = OTHER; note = 2'-O-methylguanosine-3'-phosphate
  modified_base 4: mod_base = OTHER; note = 2'-O-methylcytidine-3'-phosphate
  modified_base 5: mod_base = OTHER; note = 2'-O-methyluridine-3'-phosphate
  modified_base 6: mod_base = OTHER; note = 2'-deoxy-2'-fluoroguanosine-3'-phosphate
  modified_base 7: mod_base = OTHER; note = 2'-O-methyluridine-3'-phosphate
  modified_base 8: mod_base = OTHER; note = 2'-deoxy-2'-fluorocytidine-3'-phosphate
  modified_base 9: mod_base = OTHER; note = 2'-deoxy-2'-fluoroadenosine-3'-phosphate
  modified_base 10: mod_base = OTHER; note = 2'-O-methylguanosine-3'-phosphate
  modified_base 11: mod_base = OTHER; note = 2'-O-methylguanosine-3'-phosphate
  modified_base 12: mod_base = OTHER; note = 2'-O-methyluridine-3'-phosphate
  modified_base 13: mod_base = OTHER; note = 2'-O-methyladenosine-3'-phosphate
  modified_base 14: mod_base = OTHER; note = 2'-deoxy-2'-fluorocytidine-3'-phosphate
  modified_base 15: mod_base = OTHER; note = 2'-O-methyladenosine-3'-phosphate
  modified_base 16: mod_base = OTHER; note = 2'-deoxy-2'-fluorocytidine-3'-phosphate
  modified_base 17: mod_base = OTHER; note = 2'-O-methylguanosine-3'-phosphate
  modified_base 18: mod_base = OTHER; note = 2'-O-methylguanosine-3'-phosphate
  modified_base 19: mod_base = OTHER; note = 2'-O-methylguanosine-3'-phosphate
  modified_base 20: mod_base = OTHER; note = 2'-O-methyluridine-3'-phosphate
  modified_base 21: mod_base = OTHER; note = 2'-O-methylguanosine-3'-phosphorothioate
  modified_base 22: mod_base = OTHER; note = 2'-O-methylcytidine-3'-phosphorothioate
  modified_base 23: mod_base = OTHER; note = 2'-O-methyladenosine
tcgctgtcaggtacacgggtgca

SEQ ID NO: 451 - RNA, 23 nt, synthetic construct
  source 1..23: mol_type = other RNA
  modified_base 1: mod_base = OTHER; note = 2'-O-methyluridine-3'-phosphorothioate 5'-(E)-Vinylphosphonate
  modified_base 2: mod_base = OTHER; note = 2'-deoxy-2'-fluorouridine-3'-phosphorothioate
  modified_base 3: mod_base = OTHER; note = 2'-O-methyladenosine-3'-phosphate
  modified_base 4: mod_base = OTHER; note = 2'-O-methylcytidine-3'-phosphate
  modified_base 5: mod_base = OTHER; note = 2'-O-methyluridine-3'-phosphate
  modified_base 6: mod_base = OTHER; note = 2'-deoxy-2'-fluoroguanosine-3'-phosphate
  modified_base 7: mod_base = OTHER; note = 2'-O-methyluridine-3'-phosphate
  modified_base 8: mod_base = OTHER; note = 2'-deoxy-2'-fluoroguanosine-3'-phosphate
  modified_base 9: mod_base = OTHER; note = 2'-deoxy-2'-fluoroguanosine-3'-phosphate
  modified_base 10: mod_base = OTHER; note = 2'-O-methylcytidine-3'-phosphate
  modified_base 11: mod_base = OTHER; note = 2'-O-methyladenosine-3'-phosphate
  modified_base 12: mod_base = OTHER; note = 2'-O-methyluridine-3'-phosphate
  modified_base 13: mod_base = OTHER; note = 2'-O-methylcytidine-3'-phosphate
  modified_base 14: mod_base = OTHER; note = 2'-deoxy-2'-fluoroguanosine-3'-phosphate
  modified_base 15: mod_base = OTHER; note = 2'-O-methyluridine-3'-phosphate
  modified_base 16: mod_base = OTHER; note = 2'-deoxy-2'-fluoroguanosine-3'-phosphate
  modified_base 17: mod_base = OTHER; note = 2'-O-methyladenosine-3'-phosphate
  modified_base 18: mod_base = OTHER; note = 2'-O-methyluridine-3'-phosphate
  modified_base 19: mod_base = OTHER; note = 2'-O-methylguanosine-3'-phosphate
  modified_base 20: mod_base = OTHER; note = 2'-O-methyladenosine-3'-phosphate
  modified_base 21: mod_base = OTHER; note = 2'-O-methylcytidine-3'-phosphorothioate
  modified_base 22: mod_base = OTHER; note = 2'-O-methylcytidine-3'-phosphorothioate
  modified_base 23: mod_base = OTHER; note = 2'-O-methylcytidine
ttactgtggcatcgtgatgaccc

SEQ ID NO: 452 - RNA, 23 nt, synthetic construct
  source 1..23: mol_type = other RNA
  modified_base 1: mod_base = OTHER; note = 2'-O-methyluridine-3'-phosphorothioate 5'-(E)-Vinylphosphonate
  modified_base 2: mod_base = OTHER; note = 2'-deoxy-2'-fluorouridine-3'-phosphorothioate
  modified_base 3: mod_base = OTHER; note = 2'-O-methyluridine-3'-phosphate
  modified_base 4: mod_base = OTHER; note = 2'-O-methylguanosine-3'-phosphate
  modified_base 5: mod_base = OTHER; note = 2'-O-methylcytidine-3'-phosphate
  modified_base 6: mod_base = OTHER; note = 2'-deoxy-2'-fluoroguanosine-3'-phosphate
  modified_base 7: mod_base = OTHER; note = 2'-O-methylcytidine-3'-phosphate
  modified_base 8: mod_base = OTHER; note = 2'-deoxy-2'-fluoroadenosine-3'-phosphate
  modified_base 9: mod_base = OTHER; note = 2'-deoxy-2'-fluoroguanosine-3'-phosphate
  modified_base 10: mod_base = OTHER; note = 2'-O-methylguanosine-3'-phosphate
  modified_base 11: mod_base = OTHER; note = 2'-O-methyluridine-3'-phosphate
  modified_base 12: mod_base = OTHER; note = 2'-O-methyladenosine-3'-phosphate
  modified_base 13: mod_base = OTHER; note = 2'-O-methylcytidine-3'-phosphate
  modified_base 14: mod_base = OTHER; note = 2'-deoxy-2'-fluorouridine-3'-phosphate
  modified_base 15: mod_base = OTHER; note = 2'-O-methylguanosine-3'-phosphate
  modified_base 16: mod_base = OTHER; note = 2'-deoxy-2'-fluorouridine-3'-phosphate
  modified_base 17: mod_base = OTHER; note = 2'-O-methylguanosine-3'-phosphate
  modified_base 18: mod_base = OTHER; note = 2'-O-methylguanosine-3'-phosphate
  modified_base 19: mod_base = OTHER; note = 2'-O-methylcytidine-3'-phosphate
  modified_base 20: mod_base = OTHER; note = 2'-O-methyladenosine-3'-phosphate
  modified_base 21: mod_base = OTHER; note = 2'-O-methyluridine-3'-phosphorothioate
  modified_base 22: mod_base = OTHER; note = 2'-O-methylcytidine-3'-phosphorothioate
  modified_base 23: mod_base = OTHER; note = 2'-O-methylguanosine
tttgcgcaggtactgtggcatcg

SEQ ID NO: 453 - RNA, 23 nt, synthetic construct
  source 1..23: mol_type = other RNA
  modified_base 1: mod_base = OTHER; note = 2'-O-methyluridine-3'-phosphorothioate 5'-(E)-Vinylphosphonate
  modified_base 2: mod_base = OTHER; note = 2'-deoxy-2'-fluorocytidine-3'-phosphorothioate
  modified_base 3: mod_base = OTHER; note = 2'-O-methylcytidine-3'-phosphate
  modified_base 4: mod_base = OTHER; note = 2'-O-methylguanosine-3'-phosphate
  modified_base 5: mod_base = OTHER; note = 2'-O-methyladenosine-3'-phosphate
  modified_base 6: mod_base = OTHER; note = 2'-deoxy-2'-fluoroadenosine-3'-phosphate
  modified_base 7: mod_base = OTHER; note = 2'-O-methylguanosine-3'-phosphate
  modified_base 8: mod_base = OTHER; note = 2'-deoxy-2'-fluorocytidine-3'-phosphate
  modified_base 9: mod_base = OTHER; note = 2'-deoxy-2'-fluoroguanosine-3'-phosphate
  modified_base 10: mod_base = OTHER; note = 2'-O-methylcytidine-3'-phosphate
  modified_base 11: mod_base = OTHER; note = 2'-O-methyluridine-3'-phosphate
  modified_base 12: mod_base = OTHER; note = 2'-O-methyluridine-3'-phosphate
  modified_base 13: mod_base = OTHER; note = 2'-O-methylguanosine-3'-phosphate
  modified_base 14: mod_base = OTHER; note = 2'-deoxy-2'-fluorocytidine-3'-phosphate
  modified_base 15: mod_base = OTHER; note = 2'-O-methylguanosine-3'-phosphate
  modified_base 16: mod_base = OTHER; note = 2'-deoxy-2'-fluorocytidine-3'-phosphate
  modified_base 17: mod_base = OTHER; note = 2'-O-methyladenosine-3'-phosphate
  modified_base 18: mod_base = OTHER; note = 2'-O-methylguanosine-3'-phosphate
  modified_base 19: mod_base = OTHER; note = 2'-O-methylguanosine-3'-phosphate
  modified_base 20: mod_base = OTHER; note = 2'-O-methyluridine-3'-phosphate
  modified_base 21: mod_base = OTHER; note = 2'-O-methyladenosine-3'-phosphorothioate
  modified_base 22: mod_base = OTHER; note = 2'-O-methylcytidine-3'-phosphorothioate
  modified_base 23: mod_base = OTHER; note = 2'-O-methyluridine
tccgaagcgcttgcgcaggtact

SEQ ID NO: 454 - RNA, 23 nt, synthetic construct
  source 1..23: mol_type = other RNA
  modified_base 1: mod_base = OTHER; note = 2'-O-methyluridine-3'-phosphorothioate 5'-(E)-Vinylphosphonate
  modified_base 2: mod_base = OTHER; note = 2'-deoxy-2'-fluoroadenosine-3'-phosphorothioate
  modified_base 3: mod_base = OTHER; note = 2'-O-methylguanosine-3'-phosphate
  modified_base 4: mod_base = OTHER; note = 2'-O-methyladenosine-3'-phosphate
  modified_base 5: mod_base = OTHER; note = 2'-O-methylguanosine-3'-phosphate
  modified_base 6: mod_base = OTHER; note = 2'-deoxy-2'-fluorocytidine-3'-phosphate
  modified_base 7: mod_base = OTHER; note = 2'-O-methyladenosine-3'-phosphate
  modified_base 8: mod_base = OTHER; note = 2'-deoxy-2'-fluorocytidine-3'-phosphate
  modified_base 9: mod_base = OTHER; note = 2'-deoxy-2'-fluoroadenosine-3'-phosphate
  modified_base 10: mod_base = OTHER; note = 2'-O-methylguanosine-3'-phosphate
  modified_base 11: mod_base = OTHER; note = 2'-O-methyladenosine-3'-phosphate
  modified_base 12: mod_base = OTHER; note = 2'-O-methylcytidine-3'-phosphate
  modified_base 13: mod_base = OTHER; note = 2'-O-methyladenosine-3'-phosphate
  modified_base 14: mod_base = OTHER; note = 2'-deoxy-2'-fluoroguanosine-3'-phosphate
  modified_base 15: mod_base = OTHER; note = 2'-O-methylguanosine-3'-phosphate
  modified_base 16: mod_base = OTHER; note = 2'-deoxy-2'-fluorouridine-3'-phosphate
  modified_base 17: mod_base = OTHER; note = 2'-O-methyladenosine-3'-phosphate
  modified_base 18: mod_base = OTHER; note = 2'-O-methylguanosine-3'-phosphate
  modified_base 19: mod_base = OTHER; note = 2'-O-methyladenosine-3'-phosphate
  modified_base 20: mod_base = OTHER; note = 2'-O-methylguanosine-3'-phosphate
  modified_base 21: mod_base = OTHER; note = 2'-O-methylguanosine-3'-phosphorothioate
  modified_base 22: mod_base = OTHER; note = 2'-O-methylcytidine-3'-phosphorothioate
  modified_base 23: mod_base = OTHER; note = 2'-O-methylguanosine
tagagcacagacaggtagaggcg

SEQ ID NO: 455 - RNA, 23 nt, synthetic construct
  source 1..23: mol_type = other RNA
  modified_base 1: mod_base = OTHER; note = 2'-O-methyluridine-3'-phosphorothioate 5'-(E)-Vinylphosphonate
  modified_base 2: mod_base = OTHER; note = 2'-deoxy-2'-fluoroadenosine-3'-phosphorothioate
  modified_base 3: mod_base = OTHER; note = 2'-O-methylcytidine-3'-phosphate
  modified_base 4: mod_base = OTHER; note = 2'-O-methyladenosine-3'-phosphate
  modified_base 5: mod_base = OTHER; note = 2'-O-methylguanosine-3'-phosphate
  modified_base 6: mod_base = OTHER; note = 2'-deoxy-2'-fluoroguanosine-3'-phosphate
  modified_base 7: mod_base = OTHER; note = 2'-O-methyladenosine-3'-phosphate
  modified_base 8: mod_base = OTHER; note = 2'-deoxy-2'-fluoroadenosine-3'-phosphate
  modified_base 9: mod_base = OTHER; note = 2'-deoxy-2'-fluoroadenosine-3'-phosphate
  modified_base 10: mod_base = OTHER; note = 2'-O-methyladenosine-3'-phosphate
  modified_base 11: mod_base = OTHER; note = 2'-O-methylguanosine-3'-phosphate
  modified_base 12: mod_base = OTHER; note = 2'-O-methylguanosine-3'-phosphate
  modified_base 13: mod_base = OTHER; note = 2'-O-methylguanosine-3'-phosphate
  modified_base 14: mod_base = OTHER; note = 2'-deoxy-2'-fluoroadenosine-3'-phosphate
  modified_base 15: mod_base = OTHER; note = 2'-O-methylguanosine-3'-phosphate
  modified_base 16: mod_base = OTHER; note = 2'-deoxy-2'-fluoroadenosine-3'-phosphate
  modified_base 17: mod_base = OTHER; note = 2'-O-methylguanosine-3'-phosphate
  modified_base 18: mod_base = OTHER; note = 2'-O-methylcytidine-3'-phosphate
  modified_base 19: mod_base = OTHER; note = 2'-O-methyladenosine-3'-phosphate
  modified_base 20: mod_base = OTHER; note = 2'-O-methylcytidine-3'-phosphate
  modified_base 21: mod_base = OTHER; note = 2'-O-methyladenosine-3'-phosphorothioate
  modified_base 22: mod_base = OTHER; note = 2'-O-methylguanosine-3'-phosphorothioate
  modified_base 23: mod_base = OTHER; note = 2'-O-methyladenosine
tacaggaaaagggagagcacaga

SEQ ID NO: 456 - RNA, 23 nt, synthetic construct
  source 1..23: mol_type = other RNA
  modified_base 1: mod_base = OTHER; note = 2'-O-methyluridine-3'-phosphorothioate 5'-(E)-Vinylphosphonate
  modified_base 2: mod_base = OTHER; note = 2'-deoxy-2'-fluorouridine-3'-phosphorothioate
  modified_base 3: mod_base = OTHER; note = 2'-O-methylguanosine-3'-phosphate
  modified_base 4: mod_base = OTHER; note = 2'-O-methyladenosine-3'-phosphate
  modified_base 5: mod_base = OTHER; note = 2'-O-methyladenosine-3'-phosphate
  modified_base 6: mod_base = OTHER; note = 2'-deoxy-2'-fluoroguanosine-3'-phosphate
  modified_base 7: mod_base = OTHER; note = 2'-O-methyladenosine-3'-phosphate
  modified_base 8: mod_base = OTHER; note = 2'-deoxy-2'-fluorouridine-3'-phosphate
  modified_base 9: mod_base = OTHER; note = 2'-deoxy-2'-fluoroguanosine-3'-phosphate
  modified_base 10: mod_base = OTHER; note = 2'-O-methyluridine-3'-phosphate
  modified_base 11: mod_base = OTHER; note = 2'-O-methyladenosine-3'-phosphate
  modified_base 12: mod_base = OTHER; note = 2'-O-methylcytidine-3'-phosphate
  modified_base 13: mod_base = OTHER; note = 2'-O-methyladenosine-3'-phosphate
  modified_base 14: mod_base = OTHER; note = 2'-deoxy-2'-fluoroguanosine-3'-phosphate
  modified_base 15: mod_base = OTHER; note = 2'-O-methylguanosine-3'-phosphate
  modified_base 16: mod_base = OTHER; note = 2'-deoxy-2'-fluoroadenosine-3'-phosphate
  modified_base 17: mod_base = OTHER; note = 2'-O-methyladenosine-3'-phosphate
  modified_base 18: mod_base = OTHER; note = 2'-O-methyladenosine-3'-phosphate
  modified_base 19: mod_base = OTHER; note = 2'-O-methyladenosine-3'-phosphate
  modified_base 20: mod_base = OTHER; note = 2'-O-methylguanosine-3'-phosphate
  modified_base 21: mod_base = OTHER; note = 2'-O-methylguanosine-3'-phosphorothioate
  modified_base 22: mod_base = OTHER; note = 2'-O-methylguanosine-3'-phosphorothioate
  modified_base 23: mod_base = OTHER; note = 2'-O-methyladenosine
ttgaagatgtacaggaaaaggga

SEQ ID NO: 457 - RNA, 23 nt, synthetic construct
  source 1..23: mol_type = other RNA
  modified_base 1: mod_base = OTHER; note = 2'-O-methyluridine-3'-phosphorothioate 5'-(E)-Vinylphosphonate
  modified_base 2: mod_base = OTHER; note = 2'-deoxy-2'-fluoroadenosine-3'-phosphorothioate
  modified_base 3: mod_base = OTHER; note = 2'-O-methylguanosine-3'-phosphate
  modified_base 4: mod_base = OTHER; note = 2'-O-methyladenosine-3'-phosphate
  modified_base 5: mod_base = OTHER; note = 2'-O-methyluridine-3'-phosphate
  modified_base 6: mod_base = OTHER; note = 2'-deoxy-2'-fluorocytidine-3'-phosphate
  modified_base 7: mod_base = OTHER; note = 2'-O-methyluridine-3'-phosphate
  modified_base 8: mod_base = OTHER; note = 2'-deoxy-2'-fluorouridine-3'-phosphate
  modified_base 9: mod_base = OTHER; note = 2'-deoxy-2'-fluoroguanosine-3'-phosphate
  modified_base 10: mod_base = OTHER; note = 2'-O-methylguanosine-3'-phosphate
  modified_base 11: mod_base = OTHER; note = 2'-O-methyluridine-3'-phosphate
  modified_base 12: mod_base = OTHER; note = 2'-O-methylguanosine-3'-phosphate
  modified_base 13: mod_base = OTHER; note = 2'-O-methyladenosine-3'-phosphate
  modified_base 14: mod_base = OTHER; note = 2'-deoxy-2'-fluoroadenosine-3'-phosphate
  modified_base 15: mod_base = OTHER; note = 2'-O-methylguanosine-3'-phosphate
  modified_base 16: mod_base = OTHER; note = 2'-deoxy-2'-fluoroadenosine-3'-phosphate
  modified_base 17: mod_base = OTHER; note = 2'-O-methyluridine-3'-phosphate
  modified_base 18: mod_base = OTHER; note = 2'-O-methylguanosine-3'-phosphate
  modified_base 19: mod_base = OTHER; note = 2'-O-methyluridine-3'-phosphate
  modified_base 20: mod_base = OTHER; note = 2'-O-methyladenosine-3'-phosphate
  modified_base 21: mod_base = OTHER; note = 2'-O-methylcytidine-3'-phosphorothioate
  modified_base 22: mod_base = OTHER; note = 2'-O-methyladenosine-3'-phosphorothioate
  modified_base 23: mod_base = OTHER; note = 2'-O-methylguanosine
tagatcttggtgaagatgtacag

SEQ ID NO: 458 - RNA, 23 nt, synthetic construct
  source 1..23: mol_type = other RNA
  modified_base 1: mod_base = OTHER; note = 2'-O-methyluridine-3'-phosphorothioate 5'-(E)-Vinylphosphonate
  modified_base 2: mod_base = OTHER; note = 2'-deoxy-2'-fluoroadenosine-3'-phosphorothioate
  modified_base 3: mod_base = OTHER; note = 2'-O-methyladenosine-3'-phosphate
  modified_base 4: mod_base = OTHER; note = 2'-O-methylcytidine-3'-phosphate
  modified_base 5: mod_base = OTHER; note = 2'-O-methyladenosine-3'-phosphate
  modified_base 6: mod_base = OTHER; note = 2'-deoxy-2'-fluorouridine-3'-phosphate
  modified_base 7: mod_base = OTHER; note = 2'-O-methylguanosine-3'-phosphate
  modified_base 8: mod_base = OTHER; note = 2'-deoxy-2'-fluorouridine-3'-phosphate
  modified_base 9: mod_base = OTHER; note = 2'-deoxy-2'-fluorocytidine-3'-phosphate
  modified_base 10: mod_base = OTHER; note = 2'-O-methylcytidine-3'-phosphate
  modified_base 11: mod_base = OTHER; note = 2'-O-methyladenosine-3'-phosphate
  modified_base 12: mod_base = OTHER; note = 2'-O-methylcytidine-3'-phosphate
  modified_base 13: mod_base = OTHER; note = 2'-O-methyluridine-3'-phosphate
  modified_base 14: mod_base = OTHER; note = 2'-deoxy-2'-fluoroguanosine-3'-phosphate
  modified_base 15: mod_base = OTHER; note = 2'-O-methyladenosine-3'-phosphate
  modified_base 16: mod_base = OTHER; note = 2'-deoxy-2'-fluoroguanosine-3'-phosphate
  modified_base 17: mod_base = OTHER; note = 2'-O-methyladenosine-3'-phosphate
  modified_base 18: mod_base = OTHER; note = 2'-O-methyluridine-3'-phosphate
  modified_base 19: mod_base = OTHER; note = 2'-O-methylcytidine-3'-phosphate
  modified_base 20: mod_base = OTHER; note = 2'-O-methyluridine-3'-phosphate
  modified_base 21: mod_base = OTHER; note = 2'-O-methyluridine-3'-phosphorothioate
  modified_base 22: mod_base = OTHER; note = 2'-O-methylguanosine-3'-phosphorothioate
  modified_base 23: mod_base = OTHER; note = 2'-O-methylguanosine
taacatgtccactgagatcttgg

SEQ ID NO: 459 - RNA, 23 nt, synthetic construct
  source 1..23: mol_type = other RNA
  modified_base 1: mod_base = OTHER; note = 2'-O-methyluridine-3'-phosphorothioate 5'-(E)-Vinylphosphonate
  modified_base 2: mod_base = OTHER; note = 2'-deoxy-2'-fluoroadenosine-3'-phosphorothioate
  modified_base 3: mod_base = OTHER; note = 2'-O-methylguanosine-3'-phosphate
  modified_base 4: mod_base = OTHER; note = 2'-O-methylcytidine-3'-phosphate
  modified_base 5: mod_base = OTHER; note = 2'-O-methyluridine-3'-phosphate
  modified_base 6: mod_base = OTHER; note = 2'-deoxy-2'-fluorocytidine-3'-phosphate
  modified_base 7: mod_base = OTHER; note = 2'-O-methylcytidine-3'-phosphate
  modified_base 8: mod_base = OTHER; note = 2'-deoxy-2'-fluoroguanosine-3'-phosphate
  modified_base 9: mod_base = OTHER; note = 2'-deoxy-2'-fluoroguanosine-3'-phosphate
  modified_base 10: mod_base = OTHER; note = 2'-O-methyladenosine-3'-phosphate
  modified_base 11: mod_base = OTHER; note = 2'-O-methylguanosine-3'-phosphate
  modified_base 12: mod_base = OTHER; note = 2'-O-methyladenosine-3'-phosphate
  modified_base 13: mod_base = OTHER; note = 2'-O-methyladenosine-3'-phosphate
  modified_base 14: mod_base = OTHER; note = 2'-deoxy-2'-fluorocytidine-3'-phosphate
  modified_base 15: mod_base = OTHER; note = 2'-O-methyladenosine-3'-phosphate
  modified_base 16: mod_base = OTHER; note = 2'-deoxy-2'-fluorouridine-3'-phosphate
  modified_base 17: mod_base = OTHER; note = 2'-O-methylguanosine-3'-phosphate
  modified_base 18: mod_base = OTHER; note = 2'-O-methyluridine-3'-phosphate
  modified_base 19: mod_base = OTHER; note = 2'-O-methylcytidine-3'-phosphate
  modified_base 20: mod_base = OTHER; note = 2'-O-methylcytidine-3'-phosphate
  modified_base 21: mod_base = OTHER; note = 2'-O-methyladenosine-3'-phosphorothioate
  modified_base 22: mod_base = OTHER; note = 2'-O-methylcytidine-3'-phosphorothioate
  modified_base 23: mod_base = OTHER; note = 2'-O-methyluridine
tagctccggagaacatgtccact

SEQ ID NO: 460 - RNA, 23 nt, synthetic construct
  source 1..23: mol_type = other RNA
  modified_base 1: mod_base = OTHER; note = 2'-O-methyluridine-3'-phosphorothioate 5'-(E)-Vinylphosphonate
  modified_base 2: mod_base = OTHER; note = 2'-deoxy-2'-fluorocytidine-3'-phosphorothioate
  modified_base 3: mod_base = OTHER; note = 2'-O-methyluridine-3'-phosphate
  modified_base 4: mod_base = OTHER; note = 2'-O-methylguanosine-3'-phosphate
  modified_base 5: mod_base = OTHER; note = 2'-O-methylguanosine-3'-phosphate
  modified_base 6: mod_base = OTHER; note = 2'-deoxy-2'-fluoroadenosine-3'-phosphate
  modified_base 7: mod_base = OTHER; note = 2'-O-methyluridine-3'-phosphate
  modified_base 8: mod_base = OTHER; note = 2'-deoxy-2'-fluoroguanosine-3'-phosphate
  modified_base 9: mod_base = OTHER; note = 2'-deoxy-2'-fluoroadenosine-3'-phosphate
  modified_base 10: mod_base = OTHER; note = 2'-O-methyladenosine-3'-phosphate
  modified_base 11: mod_base = OTHER; note = 2'-O-methyluridine-3'-phosphate
  modified_base 12: mod_base = OTHER; note = 2'-O-methyladenosine-3'-phosphate
  modified_base 13: mod_base = OTHER; note = 2'-O-methylcytidine-3'-phosphate
  modified_base 14: mod_base = OTHER; note = 2'-deoxy-2'-fluoroadenosine-3'-phosphate
  modified_base 15: mod_base = OTHER; note = 2'-O-methylguanosine-3'-phosphate
  modified_base 16: mod_base = OTHER; note = 2'-deoxy-2'-fluorocytidine-3'-phosphate
  modified_base 17: mod_base = OTHER; note = 2'-O-methyluridine-3'-phosphate
  modified_base 18: mod_base = OTHER; note = 2'-O-methylcytidine-3'-phosphate
  modified_base 19: mod_base = OTHER; note = 2'-O-methylcytidine-3'-phosphate
  modified_base 20: mod_base = OTHER; note = 2'-O-methylguanosine-3'-phosphate
  modified_base 21: mod_base = OTHER; note = 2'-O-methylguanosine-3'-phosphorothioate
  modified_base 22: mod_base = OTHER; note = 2'-O-methyladenosine-3'-phosphorothioate
  modified_base 23: mod_base = OTHER; note = 2'-O-methylguanosine
tctggatgaatacagctccggag

SEQ ID NO: 461 - RNA, 23 nt, synthetic construct
  source 1..23: mol_type = other RNA
  modified_base 1: mod_base = OTHER; note = 2'-O-methyluridine-3'-phosphorothioate 5'-(E)-Vinylphosphonate
  modified_base 2: mod_base = OTHER; note = 2'-deoxy-2'-fluorocytidine-3'-phosphorothioate
  modified_base 3: mod_base = OTHER; note = 2'-O-methyladenosine-3'-phosphate
  modified_base 4: mod_base = OTHER; note = 2'-O-methylguanosine-3'-phosphate
  modified_base 5: mod_base = OTHER; note = 2'-O-methylcytidine-3'-phosphate
  modified_base 6: mod_base = OTHER; note = 2'-deoxy-2'-fluorocytidine-3'-phosphate
  modified_base 7: mod_base = OTHER; note = 2'-O-methylcytidine-3'-phosphate
  modified_base 8: mod_base = OTHER; note = 2'-deoxy-2'-fluoroadenosine-3'-phosphate
  modified_base 9: mod_base = OTHER; note = 2'-deoxy-2'-fluoroguanosine-3'-phosphate
  modified_base 10: mod_base = OTHER; note = 2'-O-methyladenosine-3'-phosphate
  modified_base 11: mod_base = OTHER; note = 2'-O-methylguanosine-3'-phosphate
  modified_base 12: mod_base = OTHER; note = 2'-O-methylcytidine-3'-phosphate
  modified_base 13: mod_base = OTHER; note = 2'-O-methylcytidine-3'-phosphate
  modified_base 14: mod_base = OTHER; note = 2'-deoxy-2'-fluorouridine-3'-phosphate
  modified_base 15: mod_base = OTHER; note = 2'-O-methylguanosine-3'-phosphate
  modified_base 16: mod_base = OTHER; note = 2'-deoxy-2'-fluorocytidine-3'-phosphate
  modified_base 17: mod_base = OTHER; note = 2'-O-methyluridine-3'-phosphate
  modified_base 18: mod_base = OTHER; note = 2'-O-methylguanosine-3'-phosphate
  modified_base 19: mod_base = OTHER; note = 2'-O-methylguanosine-3'-phosphate
  modified_base 20: mod_base = OTHER; note = 2'-O-methyladenosine-3'-phosphate
  modified_base 21: mod_base = OTHER; note = 2'-O-methyluridine-3'-phosphorothioate
  modified_base 22: mod_base = OTHER; note = 2'-O-methylguanosine-3'-phosphorothioate
  modified_base 23: mod_base = OTHER; note = 2'-O-methyladenosine
tcagcccagagcctgctggatga

SEQ ID NO: 462 - RNA, 23 nt, synthetic construct
  source 1..23: mol_type = other RNA
  modified_base 1: mod_base = OTHER; note = 2'-O-methyluridine-3'-phosphorothioate 5'-(E)-Vinylphosphonate
  modified_base 2: mod_base = OTHER; note = 2'-deoxy-2'-fluoroadenosine-3'-phosphorothioate
  modified_base 3: mod_base = OTHER; note = 2'-O-methylguanosine-3'-phosphate
  modified_base 4: mod_base = OTHER; note = 2'-O-methylguanosine-3'-phosphate
  modified_base 5: mod_base = OTHER; note = 2'-O-methylcytidine-3'-phosphate
  modified_base 6: mod_base = OTHER; note = 2'-deoxy-2'-fluoroadenosine-3'-phosphate
  modified_base 7: mod_base = OTHER; note = 2'-O-methyluridine-3'-phosphate
  modified_base 8: mod_base = OTHER; note = 2'-deoxy-2'-fluoroadenosine-3'-phosphate
  modified_base 9: mod_base = OTHER; note = 2'-deoxy-2'-fluoroguanosine-3'-phosphate
  modified_base 10: mod_base = OTHER; note = 2'-O-methyladenosine-3'-phosphate
  modified_base 11: mod_base = OTHER; note = 2'-O-methyluridine-3'-phosphate
  modified_base 12: mod_base = OTHER; note = 2'-O-methylguanosine-3'-phosphate
  modified_base 13: mod_base = OTHER; note = 2'-O-methyluridine-3'-phosphate
  modified_base 14: mod_base = OTHER; note = 2'-deoxy-2'-fluorouridine-3'-phosphate
  modified_base 15: mod_base = OTHER; note = 2'-O-methylcytidine-3'-phosphate
  modified_base 16: mod_base = OTHER; note = 2'-deoxy-2'-fluorocytidine-3'-phosphate
  modified_base 17: mod_base = OTHER; note = 2'-O-methyladenosine-3'-phosphate
  modified_base 18: mod_base = OTHER; note = 2'-O-methylguanosine-3'-phosphate
  modified_base 19: mod_base = OTHER; note = 2'-O-methylcytidine-3'-phosphate
  modified_base 20: mod_base = OTHER; note = 2'-O-methylcytidine-3'-phosphate
  modified_base 21: mod_base = OTHER; note = 2'-O-methylcytidine-3'-phosphorothioate
  modified_base 22: mod_base = OTHER; note = 2'-O-methyladenosine-3'-phosphorothioate
  modified_base 23: mod_base = OTHER; note = 2'-O-methylguanosine
taggcatagatgttccagcccag

SEQ ID NO: 463 - RNA, 23 nt, synthetic construct
  source 1..23: mol_type = other RNA
  modified_base 1: mod_base = OTHER; note = 2'-O-methyluridine-3'-phosphorothioate 5'-(E)-Vinylphosphonate
  modified_base 2: mod_base = OTHER; note = 2'-deoxy-2'-fluorocytidine-3'-phosphorothioate
  modified_base 3: mod_base = OTHER; note = 2'-O-methyladenosine-3'-phosphate
  modified_base 4: mod_base = OTHER; note = 2'-O-methylguanosine-3'-phosphate
  modified_base 5: mod_base = OTHER; note = 2'-O-methyladenosine-3'-phosphate
  modified_base 6: mod_base = OTHER; note = 2'-deoxy-2'-fluoroadenosine-3'-phosphate
  modified_base 7: mod_base = OTHER; note = 2'-O-methylguanosine-3'-phosphate
  modified_base 8: mod_base = OTHER; note = 2'-deoxy-2'-fluorocytidine-3'-phosphate
  modified_base 9: mod_base = OTHER; note = 2'-deoxy-2'-fluoroguanosine-3'-phosphate
  modified_base 10: mod_base = OTHER; note = 2'-O-methylcytidine-3'-phosphate
  modified_base 11: mod_base = OTHER; note = 2'-O-methylguanosine-3'-phosphate
  modified_base 12: mod_base = OTHER; note = 2'-O-methyladenosine-3'-phosphate
  modified_base 13: mod_base = OTHER; note = 2'-O-methyluridine-3'-phosphate
  modified_base 14: mod_base = OTHER; note = 2'-deoxy-2'-fluoroguanosine-3'-phosphate
  modified_base 15: mod_base = OTHER; note = 2'-O-methyladenosine-3'-phosphate
  modified_base 16: mod_base = OTHER; note = 2'-deoxy-2'-fluorocytidine-3'-phosphate
  modified_base 17: mod_base = OTHER; note = 2'-O-methylguanosine-3'-phosphate
  modified_base 18: mod_base = OTHER; note = 2'-O-methylguanosine-3'-phosphate
  modified_base 19: mod_base = OTHER; note = 2'-O-methyladenosine-3'-phosphate
  modified_base 20: mod_base = OTHER; note = 2'-O-methylguanosine-3'-phosphate
  modified_base 21: mod_base = OTHER; note = 2'-O-methylguanosine-3'-phosphorothioate
  modified_base 22: mod_base = OTHER; note = 2'-O-methylcytidine-3'-phosphorothioate
  modified_base 23: mod_base = OTHER; note = 2'-O-methyladenosine
tcagaagcgcgatgacggaggca

SEQ ID NO: 464 - RNA, 23 nt, synthetic construct
  source 1..23: mol_type = other RNA
  modified_base 1: mod_base = OTHER; note = 2'-O-methyluridine-3'-phosphorothioate 5'-(E)-Vinylphosphonate
  modified_base 2: mod_base = OTHER; note = 2'-deoxy-2'-fluorouridine-3'-phosphorothioate
  modified_base 3: mod_base = OTHER; note = 2'-O-methylguanosine-3'-phosphate
  modified_base 4: mod_base = OTHER; note = 2'-O-methylguanosine-3'-phosphate
  modified_base 5: mod_base = OTHER; note = 2'-O-methyluridine-3'-phosphate
  modified_base 6: mod_base = OTHER; note = 2'-deoxy-2'-fluoroguanosine-3'-phosphate
  modified_base 7: mod_base = OTHER; note = 2'-O-methyladenosine-3'-phosphate
  modified_base 8: mod_base = OTHER; note = 2'-deoxy-2'-fluorouridine-3'-phosphate
  modified_base 9: mod_base = OTHER; note = 2'-deoxy-2'-fluoroguanosine-3'-phosphate
  modified_base 10: mod_base = OTHER; note = 2'-O-methylcytidine-3'-phosphate
  modified_base 11: mod_base = OTHER; note = 2'-O-methylcytidine-3'-phosphate
  modified_base 12: mod_base = OTHER; note = 2'-O-methylcytidine-3'-phosphate
  modified_base 13: mod_base = OTHER; note = 2'-O-methyladenosine-3'-phosphate
  modified_base 14: mod_base = OTHER; note = 2'-deoxy-2'-fluoroguanosine-3'-phosphate
  modified_base 15: mod_base = OTHER; note = 2'-O-methyladenosine-3'-phosphate
  modified_base 16: mod_base = OTHER; note = 2'-deoxy-2'-fluoroadenosine-3'-phosphate
  modified_base 17: mod_base = OTHER; note = 2'-O-methylguanosine-3'-phosphate
  modified_base 18: mod_base = OTHER; note = 2'-O-methylcytidine-3'-phosphate
  modified_base 19: mod_base = OTHER; note = 2'-O-methylguanosine-3'-phosphate
  modified_base 20: mod_base = OTHER; note = 2'-O-methylcytidine-3'-phosphate
  modified_base 21: mod_base = OTHER; note = 2'-O-methylguanosine-3'-phosphorothioate
  modified_base 22: mod_base = OTHER; note = 2'-O-methyladenosine-3'-phosphorothioate
  modified_base 23: mod_base = OTHER; note = 2'-O-methyluridine
ttggtgatgcccagaagcgcgat

SEQ ID NO: 465 - RNA, 23 nt, synthetic construct
  source 1..23: mol_type = other RNA
  modified_base 1: mod_base = OTHER; note = 2'-O-methyluridine-3'-phosphorothioate 5'-(E)-Vinylphosphonate
  modified_base 2: mod_base = OTHER; note = 2'-deoxy-2'-fluorouridine-3'-phosphorothioate
  modified_base 3: mod_base = OTHER; note = 2'-O-methylguanosine-3'-phosphate
  modified_base 4: mod_base = OTHER; note = 2'-O-methyluridine-3'-phosphate
  modified_base 5: mod_base = OTHER; note = 2'-O-methyladenosine-3'-phosphate
  modified_base 6: mod_base = OTHER; note = 2'-deoxy-2'-fluoroadenosine-3'-phosphate
  modified_base 7: mod_base = OTHER; note = 2'-O-methyladenosine-3'-phosphate
  modified_base 8: mod_base = OTHER; note = 2'-deoxy-2'-fluorouridine-3'-phosphate
  modified_base 9: mod_base = OTHER; note = 2'-deoxy-2'-fluorocytidine-3'-phosphate
  modified_base 10: mod_base = OTHER; note = 2'-O-methyladenosine-3'-phosphate
  modified_base 11: mod_base = OTHER; note = 2'-O-methyluridine-3'-phosphate
  modified_base 12: mod_base = OTHER; note = 2'-O-methylguanosine-3'-phosphate
  modified_base 13: mod_base = OTHER; note = 2'-O-methylguanosine-3'-phosphate
  modified_base 14: mod_base = OTHER; note = 2'-deoxy-2'-fluorouridine-3'-phosphate
  modified_base 15: mod_base = OTHER; note = 2'-O-methylguanosine-3'-phosphate
  modified_base 16: mod_base = OTHER; note = 2'-deoxy-2'-fluoroadenosine-3'-phosphate
  modified_base 17: mod_base = OTHER; note = 2'-O-methyluridine-3'-phosphate
  modified_base 18: mod_base = OTHER; note = 2'-O-methylguanosine-3'-phosphate
  modified_base 19: mod_base = OTHER; note = 2'-O-methylcytidine-3'-phosphate
  modified_base 20: mod_base = OTHER; note = 2'-O-methylcytidine-3'-phosphate
  modified_base 21: mod_base = OTHER; note = 2'-O-methylcytidine-3'-phosphorothioate
  modified_base 22: mod_base = OTHER; note = 2'-O-methyladenosine-3'-phosphorothioate
  modified_base 23: mod_base = OTHER; note = 2'-O-methylguanosine
ttgtaaatcatggtgatgcccag

SEQ ID NO: 466 - RNA, 23 nt, synthetic construct
  source 1..23: mol_type = other RNA
  modified_base 1: mod_base = OTHER; note = 2'-O-methyluridine-3'-phosphorothioate 5'-(E)-Vinylphosphonate
  modified_base 2: mod_base = OTHER; note = 2'-deoxy-2'-fluorocytidine-3'-phosphorothioate
  modified_base 3: mod_base = OTHER; note = 2'-O-methyluridine-3'-phosphate
  modified_base 4: mod_base = OTHER; note = 2'-O-methylguanosine-3'-phosphate
  modified_base 5: mod_base = OTHER; note = 2'-O-methyluridine-3'-phosphate
  modified_base 6: mod_base = OTHER; note = 2'-deoxy-2'-fluorocytidine-3'-phosphate
  modified_base 7: mod_base = OTHER; note = 2'-O-methyladenosine-3'-phosphate
  modified_base 8: mod_base = OTHER; note = 2'-deoxy-2'-fluorocytidine-3'-phosphate
  modified_base 9: mod_base = OTHER; note = 2'-deoxy-2'-fluorocytidine-3'-phosphate
  modified_base 10: mod_base = OTHER; note = 2'-O-methylguanosine-3'-phosphate
  modified_base 11: mod_base = OTHER; note = 2'-O-methyluridine-3'-phosphate
  modified_base 12: mod_base = OTHER; note = 2'-O-methylguanosine-3'-phosphate
  modified_base 13: mod_base = OTHER; note = 2'-O-methyluridine-3'-phosphate
  modified_base 14: mod_base = OTHER; note = 2'-deoxy-2'-fluoroadenosine-3'-phosphate
  modified_base 15: mod_base = OTHER; note = 2'-O-methyladenosine-3'-phosphate
  modified_base 16: mod_base = OTHER; note = 2'-deoxy-2'-fluoroadenosine-3'-phosphate
  modified_base 17: mod_base = OTHER; note = 2'-O-methyluridine-3'-phosphate
  modified_base 18: mod_base = OTHER; note = 2'-O-methylcytidine-3'-phosphate
  modified_base 19: mod_base = OTHER; note = 2'-O-methyladenosine-3'-phosphate
  modified_base 20: mod_base = OTHER; note = 2'-O-methyluridine-3'-phosphate
  modified_base 21: mod_base = OTHER; note = 2'-O-methylguanosine-3'-phosphorothioate
  modified_base 22: mod_base = OTHER; note = 2'-O-methylguanosine-3'-phosphorothioate
  modified_base 23: mod_base = OTHER; note = 2'-O-methyluridine
tctgtcaccgtgtaaatcatggt

SEQ ID NO: 467 - RNA, 23 nt, synthetic construct
  source 1..23: mol_type = other RNA
  modified_base 1: mod_base = OTHER; note = 2'-O-methyluridine-3'-phosphorothioate 5'-(E)-Vinylphosphonate
  modified_base 2: mod_base = OTHER; note = 2'-deoxy-2'-fluorocytidine-3'-phosphorothioate
  modified_base 3: mod_base = OTHER; note = 2'-O-methylcytidine-3'-phosphate
  modified_base 4: mod_base = OTHER; note = 2'-O-methyladenosine-3'-phosphate
  modified_base 5: mod_base = OTHER; note = 2'-O-methylguanosine-3'-phosphate
  modified_base 6: mod_base = OTHER; note = 2'-deoxy-2'-fluorocytidine-3'-phosphate
  modified_base 7: mod_base = OTHER; note = 2'-O-methylcytidine-3'-phosphate
  modified_base 8: mod_base = OTHER; note = 2'-deoxy-2'-fluorocytidine-3'-phosphate
  modified_base 9: mod_base = OTHER; note = 2'-deoxy-2'-fluorouridine-3'-phosphate
  modified_base 10: mod_base = OTHER; note = 2'-O-methylcytidine-3'-phosphate
  modified_base 11: mod_base = OTHER; note = 2'-O-methylcytidine-3'-phosphate
  modified_base 12: mod_base = OTHER; note = 2'-O-methyluridine-3'-phosphate
  modified_base 13: mod_base = OTHER; note = 2'-O-methylguanosine-3'-phosphate
  modified_base 14: mod_base = OTHER; note = 2'-deoxy-2'-fluorouridine-3'-phosphate
  modified_base 15: mod_base = OTHER; note = 2'-O-methylcytidine-3'-phosphate
  modified_base 16: mod_base = OTHER; note = 2'-deoxy-2'-fluoroadenosine-3'-phosphate
  modified_base 17: mod_base = OTHER; note = 2'-O-methylcytidine-3'-phosphate
  modified_base 18: mod_base = OTHER; note = 2'-O-methylcytidine-3'-phosphate
  modified_base 19: mod_base = OTHER; note = 2'-O-methylguanosine-3'-phosphate
  modified_base 20: mod_base = OTHER; note = 2'-O-methyluridine-3'-phosphate
  modified_base 21: mod_base = OTHER; note = 2'-O-methylguanosine-3'-phosphorothioate
  modified_base 22: mod_base = OTHER; note = 2'-O-methyluridine-3'-phosphorothioate
  modified_base 23: mod_base = OTHER; note = 2'-O-methyladenosine
tccagccctcctgtcaccgtgta

SEQ ID NO: 468 - RNA, 23 nt, synthetic construct
  source 1..23: mol_type = other RNA
  modified_base 1: mod_base = OTHER; note = 2'-O-methyluridine-3'-phosphorothioate 5'-(E)-Vinylphosphonate
  modified_base 2: mod_base = OTHER; note = 2'-deoxy-2'-fluorouridine-3'-phosphorothioate
  modified_base 3: mod_base = OTHER; note = 2'-O-methylguanosine-3'-phosphate
  modified_base 4: mod_base = OTHER; note = 2'-O-methyluridine-3'-phosphate
  modified_base 5: mod_base = OTHER; note = 2'-O-methylcytidine-3'-phosphate
  modified_base 6: mod_base = OTHER; note = 2'-deoxy-2'-fluorocytidine-3'-phosphate
  modified_base 7: mod_base = OTHER; note = 2'-O-methylguanosine-3'-phosphate
  modified_base 8: mod_base = OTHER; note = 2'-deoxy-2'-fluorouridine-3'-phosphate
  modified_base 9: mod_base = OTHER; note = 2'-deoxy-2'-fluoroguanosine-3'-phosphate
  modified_base 10: mod_base = OTHER; note = 2'-O-methyluridine-3'-phosphate
  modified_base 11: mod_base = OTHER; note = 2'-O-methyladenosine-3'-phosphate
  modified_base 12: mod_base = OTHER; note = 2'-O-methylcytidine-3'-phosphate
  modified_base 13: mod_base = OTHER; note = 2'-O-methyladenosine-3'-phosphate
  modified_base 14: mod_base = OTHER; note = 2'-deoxy-2'-fluorouridine-3'-phosphate
  modified_base 15: mod_base = OTHER; note = 2'-O-methylcytidine-3'-phosphate
  modified_base 16: mod_base = OTHER; note = 2'-deoxy-2'-fluoroadenosine-3'-phosphate
  modified_base 17: mod_base = OTHER; note = 2'-O-methylguanosine-3'-phosphate
  modified_base 18: mod_base = OTHER; note = 2'-O-methylcytidine-3'-phosphate
  modified_base 19: mod_base = OTHER; note = 2'-O-methylguanosine-3'-phosphate
  modified_base 20: mod_base = OTHER; note = 2'-O-methylcytidine-3'-phosphate
  modified_base 21: mod_base = OTHER; note = 2'-O-methylguanosine-3'-phosphorothioate
  modified_base 22: mod_base = OTHER; note = 2'-O-methylguanosine-3'-phosphorothioate
  modified_base 23: mod_base = OTHER; note = 2'-O-methylcytidine
ttgtccgtgtacatcagcgcggc

SEQ ID NO: 469 - RNA, 23 nt, synthetic construct
  source 1..23: mol_type = other RNA
  modified_base 1: mod_base = OTHER; note = 2'-O-methyluridine-3'-phosphorothioate 5'-(E)-Vinylphosphonate
  modified_base 2: mod_base = OTHER; note = 2'-deoxy-2'-fluoroadenosine-3'-phosphorothioate
  modified_base 3: mod_base = OTHER; note = 2'-O-methyladenosine-3'-phosphate
  modified_base 4: mod_base = OTHER; note = 2'-O-methylguanosine-3'-phosphate
  modified_base 5: mod_base = OTHER; note = 2'-O-methylguanosine-3'-phosphate
  modified_base 6: mod_base = OTHER; note = 2'-deoxy-2'-fluorouridine-3'-phosphate
  modified_base 7: mod_base = OTHER; note = 2'-O-methylcytidine-3'-phosphate
  modified_base 8: mod_base = OTHER; note = 2'-deoxy-2'-fluorouridine-3'-phosphate
  modified_base 9: mod_base = OTHER; note = 2'-deoxy-2'-fluoroguanosine-3'-phosphate
  modified_base 10: mod_base = OTHER; note = 2'-O-methyluridine-3'-phosphate
  modified_base 11: mod_base = OTHER; note = 2'-O-methyladenosine-3'-phosphate
  modified_base 12: mod_base = OTHER; note = 2'-O-methylcytidine-3'-phosphate
  modified_base 13: mod_base = OTHER; note = 2'-O-methylcytidine-3'-phosphate
  modified_base 14: mod_base = OTHER; note = 2'-deoxy-2'-fluoroguanosine-3'-phosphate
  modified_base 15: mod_base = OTHER; note = 2'-O-methyluridine-3'-phosphate
  modified_base 16: mod_base = OTHER; note = 2'-deoxy-2'-fluoroguanosine-3'-phosphate
  modified_base 17: mod_base = OTHER; note = 2'-O-methyluridine-3'-phosphate
  modified_base 18: mod_base = OTHER; note = 2'-O-methylcytidine-3'-phosphate
  modified_base 19: mod_base = OTHER; note = 2'-O-methylcytidine-3'-phosphate
  modified_base 20: mod_base = OTHER; note = 2'-O-methylguanosine-3'-phosphate
  modified_base 21: mod_base = OTHER; note = 2'-O-methyluridine-3'-phosphorothioate
  modified_base 22: mod_base = OTHER; note = 2'-O-methylguanosine-3'-phosphorothioate
  modified_base 23: mod_base = OTHER; note = 2'-O-methyluridine
taaggtctgtaccgtgtccgtgt

SEQ ID NO: 470 - RNA, 23 nt, synthetic construct
  source 1..23: mol_type = other RNA
  modified_base 1: mod_base = OTHER; note = 2'-O-methyluridine-3'-phosphorothioate 5'-(E)-Vinylphosphonate
  modified_base 2: mod_base = OTHER; note = 2'-deoxy-2'-fluoroadenosine-3'-phosphorothioate
  modified_base 3: mod_base = OTHER; note = 2'-O-methylguanosine-3'-phosphate
  modified_base 4: mod_base = OTHER; note = 2'-O-methyladenosine-3'-phosphate
  modified_base 5: mod_base = OTHER; note = 2'-O-methyladenosine-3'-phosphate
  modified_base 6: mod_base = OTHER; note = 2'-deoxy-2'-fluorouridine-3'-phosphate
  modified_base 7: mod_base = OTHER; note = 2'-O-methylguanosine-3'-phosphate
  modified_base 8: mod_base = OTHER; note = 2'-deoxy-2'-fluoroadenosine-3'-phosphate
  modified_base 9: mod_base = OTHER; note = 2'-deoxy-2'-fluorocytidine-3'-phosphate
  modified_base 10: mod_base = OTHER; note = 2'-O-methylguanosine-3'-phosphate
  modified_base 11: mod_base = OTHER; note = 2'-O-methyladenosine-3'-phosphate
  modified_base 12: mod_base = OTHER; note = 2'-O-methyladenosine-3'-phosphate
  modified_base 13: mod_base = OTHER; note = 2'-O-methylguanosine-3'-phosphate
  modified_base 14: mod_base = OTHER; note = 2'-deoxy-2'-fluoroguanosine-3'-phosphate
  modified_base 15: mod_base = OTHER; note = 2'-O-methyluridine-3'-phosphate
  modified_base 16: mod_base = OTHER; note = 2'-deoxy-2'-fluorocytidine-3'-phosphate
  modified_base 17: mod_base = OTHER; note = 2'-O-methyluridine-3'-phosphate
  modified_base 18: mod_base = OTHER; note = 2'-O-methylguanosine-3'-phosphate
  modified_base 19: mod_base = OTHER; note = 2'-O-methyluridine-3'-phosphate
  modified_base 20: mod_base = OTHER; note = 2'-O-methyladenosine-3'-phosphate
  modified_base 21: mod_base = OTHER; note = 2'-O-methylcytidine-3'-phosphorothioate
  modified_base 22: mod_base = OTHER; note = 2'-O-methylcytidine-3'-phosphorothioate
  modified_base 23: mod_base = OTHER; note = 2'-O-methylguanosine
tagaatgacgaaggtctgtaccg

SEQ ID NO: 471 - RNA, 23 nt, synthetic construct
  source 1..23: mol_type = other RNA
  modified_base 1: mod_base = OTHER; note = 2'-O-methyluridine-3'-phosphorothioate 5'-(E)-Vinylphosphonate
  modified_base 2: mod_base = OTHER; note = 2'-deoxy-2'-fluorouridine-3'-phosphorothioate
  modified_base 3: mod_base = OTHER; note = 2'-O-methyladenosine-3'-phosphate
  modified_base 4: mod_base = OTHER; note = 2'-O-methyladenosine-3'-phosphate
  modified_base 5: mod_base = OTHER; note = 2'-O-methylcytidine-3'-phosphate
  modified_base 6: mod_base = OTHER; note = 2'-deoxy-2'-fluorocytidine-3'-phosphate
  modified_base 7: mod_base = OTHER; note = 2'-O-methylcytidine-3'-phosphate
  modified_base 8: mod_base = OTHER; note = 2'-deoxy-2'-fluoroadenosine-3'-phosphate
  modified_base 9: mod_base = OTHER; note = 2'-deoxy-2'-fluorouridine-3'-phosphate
  modified_base 10: mod_base = OTHER; note = 2'-O-methylguanosine-3'-phosphate
  modified_base 11: mod_base = OTHER; note = 2'-O-methyladenosine-3'-phosphate
  modified_base 12: mod_base = OTHER; note = 2'-O-methylguanosine-3'-phosphate
  modified_base 13: mod_base = OTHER; note = 2'-O-methylguanosine-3'-phosphate
  modified_base 14: mod_base = OTHER; note = 2'-deoxy-2'-fluoroadenosine-3'-phosphate
  modified_base 15: mod_base = OTHER; note = 2'-O-methyluridine-3'-phosphate
  modified_base 16: mod_base = OTHER; note = 2'-deoxy-2'-fluoroguanosine-3'-phosphate
  modified_base 17: mod_base = OTHER; note = 2'-O-methylcytidine-3'-phosphate
  modified_base 18: mod_base = OTHER; note = 2'-O-methyladenosine-3'-phosphate
  modified_base 19: mod_base = OTHER; note = 2'-O-methylguanosine-3'-phosphate
  modified_base 20: mod_base = OTHER; note = 2'-O-methylguanosine-3'-phosphate
  modified_base 21: mod_base = OTHER; note = 2'-O-methylcytidine-3'-phosphorothioate
  modified_base 22: mod_base = OTHER; note = 2'-O-methylguanosine-3'-phosphorothioate
  modified_base 23: mod_base = OTHER; note = 2'-O-methylcytidine
ttaacccatgaggatgcaggcgc

SEQ ID NO: 472 - RNA, 23 nt, synthetic construct
  source 1..23: mol_type = other RNA
  modified_base 1: mod_base = OTHER; note = 2'-O-methyluridine-3'-phosphorothioate 5'-(E)-Vinylphosphonate
  modified_base 2: mod_base = OTHER; note = 2'-deoxy-2'-fluorouridine-3'-phosphorothioate
  modified_base 3: mod_base = OTHER; note = 2'-O-methylguanosine-3'-phosphate
  modified_base 4: mod_base = OTHER; note = 2'-O-methylguanosine-3'-phosphate
  modified_base 5: mod_base = OTHER; note = 2'-O-methyladenosine-3'-phosphate
  modified_base 6: mod_base = OTHER; note = 2'-deoxy-2'-fluoroadenosine-3'-phosphate
  modified_base 7: mod_base = OTHER; note = 2'-O-methylguanosine-3'-phosphate
  modified_base 8: mod_base = OTHER; note = 2'-deoxy-2'-fluoroguanosine-3'-phosphate
  modified_base 9: mod_base = OTHER; note = 2'-deoxy-2'-fluorocytidine-3'-phosphate
  modified_base 10: mod_base = OTHER; note = 2'-O-methylguanosine-3'-phosphate
  modified_base 11: mod_base = OTHER; note = 2'-O-methyluridine-3'-phosphate
  modified_base 12: mod_base = OTHER; note = 2'-O-methyladenosine-3'-phosphate
  modified_base 13: mod_base = OTHER; note = 2'-O-methyladenosine-3'-phosphate
  modified_base 14: mod_base = OTHER; note = 2'-deoxy-2'-fluorocytidine-3'-phosphate
  modified_base 15: mod_base = OTHER; note = 2'-O-methylcytidine-3'-phosphate
  modified_base 16: mod_base = OTHER; note = 2'-deoxy-2'-fluorocytidine-3'-phosphate
  modified_base 17: mod_base = OTHER; note = 2'-O-methyladenosine-3'-phosphate
  modified_base 18: mod_base = OTHER; note = 2'-O-methyluridine-3'-phosphate
  modified_base 19: mod_base = OTHER; note = 2'-O-methylguanosine-3'-phosphate
  modified_base 20: mod_base = OTHER; note = 2'-O-methyladenosine-3'-phosphate
  modified_base 21: mod_base = OTHER; note = 2'-O-methylguanosine-3'-phosphorothioate
  modified_base 22: mod_base = OTHER; note = 2'-O-methylguanosine-3'-phosphorothioate
  modified_base 23: mod_base = OTHER; note = 2'-O-methyladenosine
ttggaaggcgtaacccatgagga

SEQ ID NO: 473 - RNA, 23 nt, synthetic construct
  source 1..23: mol_type = other RNA
  modified_base 1: mod_base = OTHER; note = 2'-O-methyluridine-3'-phosphorothioate 5'-(E)-Vinylphosphonate
  modified_base 2: mod_base = OTHER; note = 2'-deoxy-2'-fluorocytidine-3'-phosphorothioate
  modified_base 3: mod_base = OTHER; note = 2'-O-methylcytidine-3'-phosphate
  modified_base 4: mod_base = OTHER; note = 2'-O-methylcytidine-3'-phosphate
  modified_base 5: mod_base = OTHER; note = 2'-O-methyladenosine-3'-phosphate
  modified_base 6: mod_base = OTHER; note = 2'-deoxy-2'-fluorocytidine-3'-phosphate
  modified_base 7: mod_base = OTHER; note = 2'-O-methylcytidine-3'-phosphate
  modified_base 8: mod_base = OTHER; note = 2'-deoxy-2'-fluorouridine-3'-phosphate
  modified_base 9: mod_base = OTHER; note = 2'-deoxy-2'-fluorocytidine-3'-phosphate
  modified_base 10: mod_base = OTHER; note = 2'-O-methylguanosine-3'-phosphate
  modified_base 11: mod_base = OTHER; note = 2'-O-methyluridine-3'-phosphate
  modified_base 12: mod_base = OTHER; note = 2'-O-methylguanosine-3'-phosphate
  modified_base 13: mod_base = OTHER; note = 2'-O-methylguanosine-3'-phosphate
  modified_base 14: mod_base = OTHER; note = 2'-deoxy-2'-fluoroadenosine-3'-phosphate
  modified_base 15: mod_base = OTHER; note = 2'-O-methyladenosine-3'-phosphate
  modified_base 16: mod_base = OTHER; note = 2'-deoxy-2'-fluoroguanosine-3'-phosphate
  modified_base 17: mod_base = OTHER; note = 2'-O-methylguanosine-3'-phosphate
  modified_base 18: mod_base = OTHER; note = 2'-O-methylcytidine-3'-phosphate
  modified_base 19: mod_base = OTHER; note = 2'-O-methylguanosine-3'-phosphate
  modified_base 20: mod_base = OTHER; note = 2'-O-methyluridine-3'-phosphate
  modified_base 21: mod_base = OTHER; note = 2'-O-methyladenosine-3'-phosphorothioate
  modified_base 22: mod_base = OTHER; note = 2'-O-methyladenosine-3'-phosphorothioate
  modified_base 23: mod_base = OTHER; note = 2'-O-methylcytidine
tcccacctcgtggaaggcgtaac

SEQ ID NO: 474 - RNA, 23 nt, synthetic construct
  source 1..23: mol_type = other RNA
  modified_base 1: mod_base = OTHER; note = 2'-O-methyluridine-3'-phosphorothioate 5'-(E)-Vinylphosphonate
  modified_base 2: mod_base = OTHER; note = 2'-deoxy-2'-fluoroguanosine-3'-phosphorothioate
  modified_base 3: mod_base = OTHER; note = 2'-O-methyladenosine-3'-phosphate
  modified_base 4: mod_base = OTHER; note = 2'-O-methyladenosine-3'-phosphate
  modified_base 5: mod_base = OTHER; note = 2'-O-methyluridine-3'-phosphate
  modified_base 6: mod_base = OTHER; note = 2'-deoxy-2'-fluoroadenosine-3'-phosphate
  modified_base 7: mod_base = OTHER; note = 2'-O-methylcytidine-3'-phosphate
  modified_base 8: mod_base = OTHER; note = 2'-deoxy-2'-fluorocytidine-3'-phosphate
  modified_base 9: mod_base = OTHER; note = 2'-deoxy-2'-fluorocytidine-3'-phosphate
  modified_base 10: mod_base = OTHER; note = 2'-O-methylguanosine-3'-phosphate
  modified_base 11: mod_base = OTHER; note = 2'-O-methylcytidine-3'-phosphate
  modified_base 12: mod_base = OTHER; note = 2'-O-methylcytidine-3'-phosphate
  modified_base 13: mod_base = OTHER; note = 2'-O-methylcytidine-3'-phosphate
  modified_base 14: mod_base = OTHER; note = 2'-deoxy-2'-fluoroadenosine-3'-phosphate
  modified_base 15: mod_base = OTHER; note = 2'-O-methylcytidine-3'-phosphate
  modified_base 16: mod_base = OTHER; note = 2'-deoxy-2'-fluorocytidine-3'-phosphate
  modified_base 17: mod_base = OTHER; note = 2'-O-methyluridine-3'-phosphate
  modified_base 18: mod_base = OTHER; note = 2'-O-methylcytidine-3'-phosphate
  modified_base 19: mod_base = OTHER; note = 2'-O-methylguanosine-3'-phosphate
  modified_base 20: mod_base = OTHER; note = 2'-O-methyluridine-3'-phosphate
  modified_base 21: mod_base = OTHER; note = 2'-O-methylguanosine-3'-phosphorothioate
  modified_base 22: mod_base = OTHER; note = 2'-O-methylguanosine-3'-phosphorothioate
  modified_base 23: mod_base = OTHER; note = 2'-O-methyladenosine
tgaatacccgcccacctcgtgga

SEQ ID NO: 475 - RNA, 23 nt, synthetic construct
  source 1..23: mol_type = other RNA
  modified_base 1: mod_base = OTHER; note = 2'-O-methyluridine-3'-phosphorothioate 5'-(E)-Vinylphosphonate
  modified_base 2: mod_base = OTHER; note = 2'-deoxy-2'-fluorocytidine-3'-phosphorothioate
  modified_base 3: mod_base = OTHER; note = 2'-O-methylguanosine-3'-phosphate
  modified_base 4: mod_base = OTHER; note = 2'-O-methyladenosine-3'-phosphate
  modified_base 5: mod_base = OTHER; note = 2'-O-methyladenosine-3'-phosphate
  modified_base 6: mod_base = OTHER; note = 2'-deoxy-2'-fluoroguanosine-3'-phosphate
  modified_base 7: mod_base = OTHER; note = 2'-O-methyladenosine-3'-phosphate
  modified_base 8: mod_base = OTHER; note = 2'-deoxy-2'-fluoroguanosine-3'-phosphate
  modified_base 9: mod_base = OTHER; note = 2'-deoxy-2'-fluoroadenosine-3'-phosphate
  modified_base 10: mod_base = OTHER; note = 2'-O-methylcytidine-3'-phosphate
  modified_base 11: mod_base = OTHER; note = 2'-O-methylcytidine-3'-phosphate
  modified_base 12: mod_base = OTHER; note = 2'-O-methylcytidine-3'-phosphate
  modified_base 13: mod_base = OTHER; note = 2'-O-methylguanosine-3'-phosphate
  modified_base 14: mod_base = OTHER; note = 2'-deoxy-2'-fluoroadenosine-3'-phosphate
  modified_base 15: mod_base = OTHER; note = 2'-O-methyladenosine-3'-phosphate
  modified_base 16: mod_base = OTHER; note = 2'-deoxy-2'-fluorouridine-3'-phosphate
  modified_base 17: mod_base = OTHER; note = 2'-O-methyladenosine-3'-phosphate
  modified_base 18: mod_base = OTHER; note = 2'-O-methylcytidine-3'-phosphate
  modified_base 19: mod_base = OTHER; note = 2'-O-methylcytidine-3'-phosphate
  modified_base 20: mod_base = OTHER; note = 2'-O-methylcytidine-3'-phosphate
  modified_base 21: mod_base = OTHER; note = 2'-O-methylguanosine-3'-phosphorothioate
  modified_base 22: mod_base = OTHER; note = 2'-O-methylcytidine-3'-phosphorothioate
  modified_base 23: mod_base = OTHER; note = 2'-O-methylcytidine
tcgaagagacccgaatacccgcc

SEQ ID NO: 476 - RNA, 23 nt, synthetic construct
  source 1..23: mol_type = other RNA
  modified_base 1: mod_base = OTHER; note = 2'-O-methyluridine-3'-phosphorothioate 5'-(E)-Vinylphosphonate
  modified_base 2: mod_base = OTHER; note = 2'-deoxy-2'-fluoroadenosine-3'-phosphorothioate
  modified_base 3: mod_base = OTHER; note = 2'-O-methylguanosine-3'-phosphate
  modified_base 4: mod_base = OTHER; note = 2'-O-methylguanosine-3'-phosphate
  modified_base 5: mod_base = OTHER; note = 2'-O-methyluridine-3'-phosphate
  modified_base 6: mod_base = OTHER; note = 2'-deoxy-2'-fluoroadenosine-3'-phosphate
  modified_base 7: mod_base = OTHER; note = 2'-O-methyluridine-3'-phosphate
  modified_base 8: mod_base = OTHER; note = 2'-deoxy-2'-fluorouridine-3'-phosphate
  modified_base 9: mod_base = OTHER; note = 2'-deoxy-2'-fluorouridine-3'-phosphate
  modified_base 10: mod_base = OTHER; note = 2'-O-methylguanosine-3'-phosphate
  modified_base 11: mod_base = OTHER; note = 2'-O-methyluridine-3'-phosphate
  modified_base 12: mod_base = OTHER; note = 2'-O-methylcytidine-3'-phosphate
  modified_base 13: mod_base = OTHER; note = 2'-O-methylguanosine-3'-phosphate
  modified_base 14: mod_base = OTHER; note = 2'-deoxy-2'-fluoroadenosine-3'-phosphate
  modified_base 15: mod_base = OTHER; note = 2'-O-methyladenosine-3'-phosphate
  modified_base 16: mod_base = OTHER; note = 2'-deoxy-2'-fluoroguanosine-3'-phosphate
  modified_base 17: mod_base = OTHER; note = 2'-O-methyladenosine-3'-phosphate
  modified_base 18: mod_base = OTHER; note = 2'-O-methylguanosine-3'-phosphate
  modified_base 19: mod_base = OTHER; note = 2'-O-methyladenosine-3'-phosphate
  modified_base 20: mod_base = OTHER; note = 2'-O-methylcytidine-3'-phosphate
  modified_base 21: mod_base = OTHER; note = 2'-O-methylcytidine-3'-phosphorothioate
  modified_base 22: mod_base = OTHER; note = 2'-O-methylcytidine-3'-phosphorothioate
  modified_base 23: mod_base = OTHER; note = 2'-O-methylguanosine
taggtatttgtcgaagagacccg

SEQ ID NO: 477 - RNA, 23 nt, synthetic construct
  source 1..23: mol_type = other RNA
  modified_base 1: mod_base = OTHER; note = 2'-O-methyluridine-3'-phosphorothioate 5'-(E)-Vinylphosphonate
  modified_base 2: mod_base = OTHER; note = 2'-deoxy-2'-fluoroguanosine-3'-phosphorothioate
  modified_base 3: mod_base = OTHER; note = 2'-O-methylcytidine-3'-phosphate
  modified_base 4: mod_base = OTHER; note = 2'-O-methylguanosine-3'-phosphate
  modified_base 5: mod_base = OTHER; note = 2'-O-methyladenosine-3'-phosphate
  modified_base 6: mod_base = OTHER; note = 2'-deoxy-2'-fluoroadenosine-3'-phosphate
  modified_base 7: mod_base = OTHER; note = 2'-O-methylguanosine-3'-phosphate
  modified_base 8: mod_base = OTHER; note = 2'-deoxy-2'-fluorouridine-3'-phosphate
  modified_base 9: mod_base = OTHER; note = 2'-deoxy-2'-fluorocytidine-3'-phosphate
  modified_base 10: mod_base = OTHER; note = 2'-O-methylguanosine-3'-phosphate
  modified_base 11: mod_base = OTHER; note = 2'-O-methylcytidine-3'-phosphate
  modified_base 12: mod_base = OTHER; note = 2'-O-methyluridine-3'-phosphate
  modified_base 13: mod_base = OTHER; note = 2'-O-methylguanosine-3'-phosphate
  modified_base 14: mod_base = OTHER; note = 2'-deoxy-2'-fluorocytidine-3'-phosphate
  modified_base 15: mod_base = OTHER; note = 2'-O-methyluridine-3'-phosphate
  modified_base 16: mod_base = OTHER; note = 2'-deoxy-2'-fluorocytidine-3'-phosphate
  modified_base 17: mod_base = OTHER; note = 2'-O-methylcytidine-3'-phosphate
  modified_base 18: mod_base = OTHER; note = 2'-O-methylcytidine-3'-phosphate
  modified_base 19: mod_base = OTHER; note = 2'-O-methyladenosine-3'-phosphate
  modified_base 20: mod_base = OTHER; note = 2'-O-methylguanosine-3'-phosphate
  modified_base 21: mod_base = OTHER; note = 2'-O-methylguanosine-3'-phosphorothioate
  modified_base 22: mod_base = OTHER; note = 2'-O-methyluridine-3'-phosphorothioate
  modified_base 23: mod_base = OTHER; note = 2'-O-methyladenosine
tgcgaagtcgctgctcccaggta

SEQ ID NO: 478 - RNA, 23 nt, synthetic construct
  source 1..23: mol_type = other RNA
  modified_base 1: mod_base = OTHER; note = 2'-O-methyluridine-3'-phosphorothioate 5'-(E)-Vinylphosphonate
  modified_base 2: mod_base = OTHER; note = 2'-deoxy-2'-fluoroadenosine-3'-phosphorothioate
  modified_base 3: mod_base = OTHER; note = 2'-O-methylcytidine-3'-phosphate
  modified_base 4: mod_base = OTHER; note = 2'-O-methyladenosine-3'-phosphate
  modified_base 5: mod_base = OTHER; note = 2'-O-methylcytidine-3'-phosphate
  modified_base 6: mod_base = OTHER; note = 2'-deoxy-2'-fluorocytidine-3'-phosphate
  modified_base 7: mod_base = OTHER; note = 2'-O-methylguanosine-3'-phosphate
  modified_base 8: mod_base = OTHER; note = 2'-deoxy-2'-fluorouridine-3'-phosphate
  modified_base 9: mod_base = OTHER; note = 2'-deoxy-2'-fluorocytidine-3'-phosphate
  modified_base 10: mod_base = OTHER; note = 2'-O-methyladenosine-3'-phosphate
  modified_base 11: mod_base = OTHER; note = 2'-O-methylguanosine-3'-phosphate
  modified_base 12: mod_base = OTHER; note = 2'-O-methylcytidine-3'-phosphate
  modified_base 13: mod_base = OTHER; note = 2'-O-methylguanosine-3'-phosphate
  modified_base 14: mod_base = OTHER; note = 2'-deoxy-2'-fluoroadenosine-3'-phosphate
  modified_base 15: mod_base = OTHER; note = 2'-O-methyladenosine-3'-phosphate
  modified_base 16: mod_base = OTHER; note = 2'-deoxy-2'-fluoroguanosine-3'-phosphate
  modified_base 17: mod_base = OTHER; note = 2'-O-methyluridine-3'-phosphate
  modified_base 18: mod_base = OTHER; note = 2'-O-methylcytidine-3'-phosphate
  modified_base 19: mod_base = OTHER; note = 2'-O-methylguanosine-3'-phosphate
  modified_base 20: mod_base = OTHER; note = 2'-O-methylcytidine-3'-phosphate
  modified_base 21: mod_base = OTHER; note = 2'-O-methyluridine-3'-phosphorothioate
  modified_base 22: mod_base = OTHER; note = 2'-O-methylguanosine-3'-phosphorothioate
  modified_base 23: mod_base = OTHER; note = 2'-O-methylcytidine
tacaccgtcagcgaagtcgctgc

SEQ ID NO: 479 - RNA, 23 nt, synthetic construct
  source 1..23: mol_type = other RNA
  modified_base 1: mod_base = OTHER; note = 2'-O-methyluridine-3'-phosphorothioate 5'-(E)-Vinylphosphonate
  modified_base 2: mod_base = OTHER; note = 2'-deoxy-2'-fluorouridine-3'-phosphorothioate
  modified_base 3: mod_base = OTHER; note = 2'-O-methylguanosine-3'-phosphate
  modified_base 4: mod_base = OTHER; note = 2'-O-methylguanosine-3'-phosphate
  modified_base 5: mod_base = OTHER; note = 2'-O-methyladenosine-3'-phosphate
  modified_base 6: mod_base = OTHER; note = 2'-deoxy-2'-fluorouridine-3'-phosphate
  modified_base 7: mod_base = OTHER; note = 2'-O-methylcytidine-3'-phosphate
  modified_base 8: mod_base = OTHER; note = 2'-deoxy-2'-fluorocytidine-3'-phosphate
  modified_base 9: mod_base = OTHER; note = 2'-deoxy-2'-fluorouridine-3'-phosphate
  modified_base 10: mod_base = OTHER; note = 2'-O-methylcytidine-3'-phosphate
  modified_base 11: mod_base = OTHER; note = 2'-O-methylguanosine-3'-phosphate
  modified_base 12: mod_base = OTHER; note = 2'-O-methylguanosine-3'-phosphate
  modified_base 13: mod_base = OTHER; note = 2'-O-methyladenosine-3'-phosphate
  modified_base 14: mod_base = OTHER; note = 2'-deoxy-2'-fluorocytidine-3'-phosphate
  modified_base 15: mod_base = OTHER; note = 2'-O-methyladenosine-3'-phosphate
  modified_base 16: mod_base = OTHER; note = 2'-deoxy-2'-fluorocytidine-3'-phosphate
  modified_base 17: mod_base = OTHER; note = 2'-O-methylcytidine-3'-phosphate
  modified_base 18: mod_base = OTHER; note = 2'-O-methylguanosine-3'-phosphate
  modified_base 19: mod_base = OTHER; note = 2'-O-methyluridine-3'-phosphate
  modified_base 20: mod_base = OTHER; note = 2'-O-methylcytidine-3'-phosphate
  modified_base 21: mod_base = OTHER; note = 2'-O-methyladenosine-3'-phosphorothioate
  modified_base 22: mod_base = OTHER; note = 2'-O-methylguanosine-3'-phosphorothioate
  modified_base 23: mod_base = OTHER; note = 2'-O-methylcytidine
ttggatcctcggacaccgtcagc

SEQ ID NO: 480 - RNA, 23 nt, synthetic construct
  source 1..23: mol_type = other RNA
  modified_base 1: mod_base = OTHER; note = 2'-O-methyluridine-3'-phosphorothioate 5'-(E)-Vinylphosphonate
  modified_base 2: mod_base = OTHER; note = 2'-deoxy-2'-fluoroadenosine-3'-phosphorothioate
  modified_base 3: mod_base = OTHER; note = 2'-O-methylguanosine-3'-phosphate
  modified_base 4: mod_base = OTHER; note = 2'-O-methyladenosine-3'-phosphate
  modified_base 5: mod_base = OTHER; note = 2'-O-methyluridine-3'-phosphate
  modified_base 6: mod_base = OTHER; note = 2'-deoxy-2'-fluoroguanosine-3'-phosphate
  modified_base 7: mod_base = OTHER; note = 2'-O-methyluridine-3'-phosphate
  modified_base 8: mod_base = OTHER; note = 2'-deoxy-2'-fluorouridine-3'-phosphate
  modified_base 9: mod_base = OTHER; note = 2'-deoxy-2'-fluorouridine-3'-phosphate
  modified_base 10: mod_base = OTHER; note = 2'-O-methylcytidine-3'-phosphate
  modified_base 11: mod_base = OTHER; note = 2'-O-methylcytidine-3'-phosphate
  modified_base 12: mod_base = OTHER; note = 2'-O-methylcytidine-3'-phosphate
  modified_base 13: mod_base = OTHER; note = 2'-O-methyladenosine-3'-phosphate
  modified_base 14: mod_base = OTHER; note = 2'-deoxy-2'-fluorocytidine-3'-phosphate
  modified_base 15: mod_base = OTHER; note = 2'-O-methylguanosine-3'-phosphate
  modified_base 16: mod_base = OTHER; note = 2'-deoxy-2'-fluoroguanosine-3'-phosphate
  modified_base 17: mod_base = OTHER; note = 2'-O-methylcytidine-3'-phosphate
  modified_base 18: mod_base = OTHER; note = 2'-O-methyluridine-3'-phosphate
  modified_base 19: mod_base = OTHER; note = 2'-O-methylguanosine-3'-phosphate
  modified_base 20: mod_base = OTHER; note = 2'-O-methylguanosine-3'-phosphate
  modified_base 21: mod_base = OTHER; note = 2'-O-methyladenosine-3'-phosphorothioate
  modified_base 22: mod_base = OTHER; note = 2'-O-methyluridine-3'-phosphorothioate
  modified_base 23: mod_base = OTHER; note = 2'-O-methylcytidine
tagatgtttcccacggctggatc

SEQ ID NO: 481 - RNA, 23 nt, synthetic construct
  source 1..23: mol_type = other RNA
  modified_base 1: mod_base = OTHER; note = 2'-O-methyluridine-3'-phosphorothioate 5'-(E)-Vinylphosphonate
  modified_base 2: mod_base = OTHER; note = 2'-deoxy-2'-fluoroadenosine-3'-phosphorothioate
  modified_base 3: mod_base = OTHER; note = 2'-O-methylguanosine-3'-phosphate
  modified_base 4: mod_base = OTHER; note = 2'-O-methyladenosine-3'-phosphate
  modified_base 5: mod_base = OTHER; note = 2'-O-methyladenosine-3'-phosphate
  modified_base 6: mod_base = OTHER; note = 2'-deoxy-2'-fluoroguanosine-3'-phosphate
  modified_base 7: mod_base = OTHER; note = 2'-O-methylcytidine-3'-phosphate
  modified_base 8: mod_base = OTHER; note = 2'-deoxy-2'-fluorouridine-3'-phosphate
  modified_base 9: mod_base = OTHER; note = 2'-deoxy-2'-fluoroguanosine-3'-phosphate
  modified_base 10: mod_base = OTHER; note = 2'-O-methylguanosine-3'-phosphate
  modified_base 11: mod_base = OTHER; note = 2'-O-methyladenosine-3'-phosphate
  modified_base 12: mod_base = OTHER; note = 2'-O-methylguanosine-3'-phosphate
  modified_base 13: mod_base = OTHER; note = 2'-O-methyladenosine-3'-phosphate
  modified_base 14: mod_base = OTHER; note = 2'-deoxy-2'-fluorouridine-3'-phosphate
  modified_base 15: mod_base = OTHER; note = 2'-O-methylguanosine-3'-phosphate
  modified_base 16: mod_base = OTHER; note = 2'-deoxy-2'-fluorouridine-3'-phosphate
  modified_base 17: mod_base = OTHER; note = 2'-O-methyluridine-3'-phosphate
  modified_base 18: mod_base = OTHER; note = 2'-O-methyluridine-3'-phosphate
  modified_base 19: mod_base = OTHER; note = 2'-O-methylcytidine-3'-phosphate
  modified_base 20: mod_base = OTHER; note = 2'-O-methylcytidine-3'-phosphate
  modified_base 21: mod_base = OTHER; note = 2'-O-methylcytidine-3'-phosphorothioate
  modified_base 22: mod_base = OTHER; note = 2'-O-methyladenosine-3'-phosphorothioate
  modified_base 23: mod_base = OTHER; note = 2'-O-methylcytidine
tagaagctggagatgtttcccac

SEQ ID NO: 482 - RNA, 23 nt, synthetic construct
  source 1..23: mol_type = other RNA
  modified_base 1: mod_base = OTHER; note = 2'-O-methyluridine-3'-phosphorothioate 5'-(E)-Vinylphosphonate
  modified_base 2: mod_base = OTHER; note = 2'-deoxy-2'-fluoroguanosine-3'-phosphorothioate
  modified_base 3: mod_base = OTHER; note = 2'-O-methyluridine-3'-phosphate
  modified_base 4: mod_base = OTHER; note = 2'-O-methylcytidine-3'-phosphate
  modified_base 5: mod_base = OTHER; note = 2'-O-methylguanosine-3'-phosphate
  modified_base 6: mod_base = OTHER; note = 2'-deoxy-2'-fluoroadenosine-3'-phosphate
  modified_base 7: mod_base = OTHER; note = 2'-O-methyluridine-3'-phosphate
  modified_base 8: mod_base = OTHER; note = 2'-deoxy-2'-fluoroadenosine-3'-phosphate
  modified_base 9: mod_base = OTHER; note = 2'-deoxy-2'-fluoroguanosine-3'-phosphate
  modified_base 10: mod_base = OTHER; note = 2'-O-methylcytidine-3'-phosphate
  modified_base 11: mod_base = OTHER; note = 2'-O-methyladenosine-3'-phosphate
  modified_base 12: mod_base = OTHER; note = 2'-O-methylguanosine-3'-phosphate
  modified_base 13: mod_base = OTHER; note = 2'-O-methyladenosine-3'-phosphate
  modified_base 14: mod_base = OTHER; note = 2'-deoxy-2'-fluoroadenosine-3'-phosphate
  modified_base 15: mod_base = OTHER; note = 2'-O-methylguanosine-3'-phosphate
  modified_base 16: mod_base = OTHER; note = 2'-deoxy-2'-fluorocytidine-3'-phosphate
  modified_base 17: mod_base = OTHER; note = 2'-O-methyluridine-3'-phosphate
  modified_base 18: mod_base = OTHER; note = 2'-O-methylguanosine-3'-phosphate
  modified_base 19: mod_base = OTHER; note = 2'-O-methylguanosine-3'-phosphate
  modified_base 20: mod_base = OTHER; note = 2'-O-methyladenosine-3'-phosphate
  modified_base 21: mod_base = OTHER; note = 2'-O-methylguanosine-3'-phosphorothioate
  modified_base 22: mod_base = OTHER; note = 2'-O-methyladenosine-3'-phosphorothioate
  modified_base 23: mod_base = OTHER; note = 2'-O-methyluridine
tgtcgatagcagaagctggagat

SEQ ID NO: 483 - RNA, 23 nt, synthetic construct
  source 1..23: mol_type = other RNA
  modified_base 1: mod_base = OTHER; note = 2'-O-methyluridine-3'-phosphorothioate 5'-(E)-Vinylphosphonate
  modified_base 2: mod_base = OTHER; note = 2'-deoxy-2'-fluorouridine-3'-phosphorothioate
  modified_base 3: mod_base = OTHER; note = 2'-O-methylguanosine-3'-phosphate
  modified_base 4: mod_base = OTHER; note = 2'-O-methylcytidine-3'-phosphate
  modified_base 5: mod_base = OTHER; note = 2'-O-methylcytidine-3'-phosphate
  modified_base 6: mod_base = OTHER; note = 2'-deoxy-2'-fluoroguanosine-3'-phosphate
  modified_base 7: mod_base = OTHER; note = 2'-O-methylguanosine-3'-phosphate
  modified_base 8: mod_base = OTHER; note = 2'-deoxy-2'-fluoroadenosine-3'-phosphate
  modified_base 9: mod_base = OTHER; note = 2'-deoxy-2'-fluoroguanosine-3'-phosphate
  modified_base 10: mod_base = OTHER; note = 2'-O-methylcytidine-3'-phosphate
  modified_base 11: mod_base = OTHER; note = 2'-O-methyladenosine-3'-phosphate
  modified_base 12: mod_base = OTHER; note = 2'-O-methylguanosine-3'-phosphate
  modified_base 13: mod_base = OTHER; note = 2'-O-methylguanosine-3'-phosphate
  modified_base 14: mod_base = OTHER; note = 2'-deoxy-2'-fluorouridine-3'-phosphate
  modified_base 15: mod_base = OTHER; note = 2'-O-methylguanosine-3'-phosphate
  modified_base 16: mod_base = OTHER; note = 2'-deoxy-2'-fluoroguanosine-3'-phosphate
  modified_base 17: mod_base = OTHER; note = 2'-O-methyluridine-3'-phosphate
  modified_base 18: mod_base = OTHER; note = 2'-O-methyladenosine-3'-phosphate
  modified_base 19: mod_base = OTHER; note = 2'-O-methylguanosine-3'-phosphate
  modified_base 20: mod_base = OTHER; note = 2'-O-methylguanosine-3'-phosphate
  modified_base 21: mod_base = OTHER; note = 2'-O-methyladenosine-3'-phosphorothioate
  modified_base 22: mod_base = OTHER; note = 2'-O-methylguanosine-3'-phosphorothioate
  modified_base 23: mod_base = OTHER; note = 2'-O-methyluridine
ttgccggagcaggtggtaggagt

SEQ ID NO: 484 - RNA, 23 nt, synthetic construct
  source 1..23: mol_type = other RNA
  modified_base 1: mod_base = OTHER; note = 2'-O-methyluridine-3'-phosphorothioate 5'-(E)-Vinylphosphonate
  modified_base 2: mod_base = OTHER; note = 2'-deoxy-2'-fluorocytidine-3'-phosphorothioate
  modified_base 3: mod_base = OTHER; note = 2'-O-methylguanosine-3'-phosphate
  modified_base 4: mod_base = OTHER; note = 2'-O-methyladenosine-3'-phosphate
  modified_base 5: mod_base = OTHER; note = 2'-O-methylguanosine-3'-phosphate
  modified_base 6: mod_base = OTHER; note = 2'-deoxy-2'-fluoroadenosine-3'-phosphate
  modified_base 7: mod_base = OTHER; note = 2'-O-methylcytidine-3'-phosphate
  modified_base 8: mod_base = OTHER; note = 2'-deoxy-2'-fluoroguanosine-3'-phosphate
  modified_base 9: mod_base = OTHER; note = 2'-deoxy-2'-fluoroadenosine-3'-phosphate
  modified_base 10: mod_base = OTHER; note = 2'-O-methyluridine-3'-phosphate
  modified_base 11: mod_base = OTHER; note = 2'-O-methyluridine-3'-phosphate
  modified_base 12: mod_base = OTHER; note = 2'-O-methylguanosine-3'-phosphate
  modified_base 13: mod_base = OTHER; note = 2'-O-methyluridine-3'-phosphate
  modified_base 14: mod_base = OTHER; note = 2'-deoxy-2'-fluoroguanosine-3'-phosphate
  modified_base 15: mod_base = OTHER; note = 2'-O-methyladenosine-3'-phosphate
  modified_base 16: mod_base = OTHER; note = 2'-deoxy-2'-fluoroguanosine-3'-phosphate
  modified_base 17: mod_base = OTHER; note = 2'-O-methyluridine-3'-phosphate
  modified_base 18: mod_base = OTHER; note = 2'-O-methylcytidine-3'-phosphate
  modified_base 19: mod_base = OTHER; note = 2'-O-methylcytidine-3'-phosphate
  modified_base 20: mod_base = OTHER; note = 2'-O-methylguanosine-3'-phosphate
  modified_base 21: mod_base = OTHER; note = 2'-O-methyladenosine-3'-phosphorothioate
  modified_base 22: mod_base = OTHER; note = 2'-O-methylguanosine-3'-phosphorothioate
  modified_base 23: mod_base = OTHER; note = 2'-O-methylguanosine
tcgagacgattgtgagtccgagg

SEQ ID NO: 485 - RNA, 23 nt, synthetic construct
  source 1..23: mol_type = other RNA
  modified_base 1: mod_base = OTHER; note = 2'-O-methyluridine-3'-phosphorothioate 5'-(E)-Vinylphosphonate
  modified_base 2: mod_base = OTHER; note = 2'-deoxy-2'-fluorouridine-3'-phosphorothioate
  modified_base 3: mod_base = OTHER; note = 2'-O-methylguanosine-3'-phosphate
  modified_base 4: mod_base = OTHER; note = 2'-O-methylcytidine-3'-phosphate
  modified_base 5: mod_base = OTHER; note = 2'-O-methyladenosine-3'-phosphate
  modified_base 6: mod_base = OTHER; note = 2'-deoxy-2'-fluorocytidine-3'-phosphate
  modified_base 7: mod_base = OTHER; note = 2'-O-methylcytidine-3'-phosphate
  modified_base 8: mod_base = OTHER; note = 2'-deoxy-2'-fluoroadenosine-3'-phosphate
  modified_base 9: mod_base = OTHER; note = 2'-deoxy-2'-fluoroguanosine-3'-phosphate
  modified_base 10: mod_base = OTHER; note = 2'-O-methyluridine-3'-phosphate
  modified_base 11: mod_base = OTHER; note = 2'-O-methyladenosine-3'-phosphate
  modified_base 12: mod_base = OTHER; note = 2'-O-methylcytidine-3'-phosphate
  modified_base 13: mod_base = OTHER; note = 2'-O-methylcytidine-3'-phosphate
  modified_base 14: mod_base = OTHER; note = 2'-deoxy-2'-fluoroadenosine-3'-phosphate
  modified_base 15: mod_base = OTHER; note = 2'-O-methylguanosine-3'-phosphate
  modified_base 16: mod_base = OTHER; note = 2'-deoxy-2'-fluorocytidine-3'-phosphate
  modified_base 17: mod_base = OTHER; note = 2'-O-methylcytidine-3'-phosphate
  modified_base 18: mod_base = OTHER; note = 2'-O-methylcytidine-3'-phosphate
  modified_base 19: mod_base = OTHER; note = 2'-O-methylguanosine-3'-phosphate
  modified_base 20: mod_base = OTHER; note = 2'-O-methyladenosine-3'-phosphate
  modified_base 21: mod_base = OTHER; note = 2'-O-methylguanosine-3'-phosphorothioate
  modified_base 22: mod_base = OTHER; note = 2'-O-methyladenosine-3'-phosphorothioate
  modified_base 23: mod_base = OTHER; note = 2'-O-methylcytidine
ttgcaccagtaccagcccgagac

SEQ ID NO: 486 - RNA, 23 nt, synthetic construct
  source 1..23: mol_type = other RNA
  modified_base 1: mod_base = OTHER; note = 2'-O-methyluridine-3'-phosphorothioate 5'-(E)-Vinylphosphonate
  modified_base 2: mod_base = OTHER; note = 2'-deoxy-2'-fluorocytidine-3'-phosphorothioate
  modified_base 3: mod_base = OTHER; note = 2'-O-methylguanosine-3'-phosphate
  modified_base 4: mod_base = OTHER; note = 2'-O-methyladenosine-3'-phosphate
  modified_base 5: mod_base = OTHER; note = 2'-O-methyluridine-3'-phosphate
  modified_base 6: mod_base = OTHER; note = 2'-deoxy-2'-fluoroguanosine-3'-phosphate
  modified_base 7: mod_base = OTHER; note = 2'-O-methyladenosine-3'-phosphate
  modified_base 8: mod_base = OTHER; note = 2'-deoxy-2'-fluorocytidine-3'-phosphate
  modified_base 9: mod_base = OTHER; note = 2'-deoxy-2'-fluorocytidine-3'-phosphate
  modified_base 10: mod_base = OTHER; note = 2'-O-methyluridine-3'-phosphate
  modified_base 11: mod_base = OTHER; note = 2'-O-methylguanosine-3'-phosphate
  modified_base 12: mod_base = OTHER; note = 2'-O-methylguanosine-3'-phosphate
  modified_base 13: mod_base = OTHER; note = 2'-O-methyluridine-3'-phosphate
  modified_base 14: mod_base = OTHER; note = 2'-deoxy-2'-fluorocytidine-3'-phosphate
  modified_base 15: mod_base = OTHER; note = 2'-O-methylguanosine-3'-phosphate
  modified_base 16: mod_base = OTHER; note = 2'-deoxy-2'-fluorocytidine-3'-phosphate
  modified_base 17: mod_base = OTHER; note = 2'-O-methyluridine-3'-phosphate
  modified_base 18: mod_base = OTHER; note = 2'-O-methylguanosine-3'-phosphate
  modified_base 19: mod_base = OTHER; note = 2'-O-methylcytidine-3'-phosphate
  modified_base 20: mod_base = OTHER; note = 2'-O-methyladenosine-3'-phosphate
  modified_base 21: mod_base = OTHER; note = 2'-O-methylcytidine-3'-phosphorothioate
  modified_base 22: mod_base = OTHER; note = 2'-O-methylcytidine-3'-phosphorothioate
  modified_base 23: mod_base = OTHER; note = 2'-O-methyladenosine
tcgatgacctggtcgctgcacca

SEQ ID NO: 487 - RNA, 23 nt, synthetic construct
  source 1..23: mol_type = other RNA
  modified_base 1: mod_base = OTHER; note = 2'-O-methyluridine-3'-phosphorothioate 5'-(E)-Vinylphosphonate
  modified_base 2: mod_base = OTHER; note = 2'-deoxy-2'-fluoroadenosine-3'-phosphorothioate
  modified_base 3: mod_base = OTHER; note = 2'-O-methylguanosine-3'-phosphate
  modified_base 4: mod_base = OTHER; note = 2'-O-methylcytidine-3'-phosphate
  modified_base 5: mod_base = OTHER; note = 2'-O-methylguanosine-3'-phosphate
  modified_base 6: mod_base = OTHER; note = 2'-deoxy-2'-fluorocytidine-3'-phosphate
  modified_base 7: mod_base = OTHER; note = 2'-O-methyluridine-3'-phosphate
  modified_base 8: mod_base = OTHER; note = 2'-deoxy-2'-fluoroguanosine-3'-phosphate
  modified_base 9: mod_base = OTHER; note = 2'-deoxy-2'-fluorocytidine-3'-phosphate
  modified_base 10: mod_base = OTHER; note = 2'-O-methyladenosine-3'-phosphate
  modified_base 11: mod_base = OTHER; note = 2'-O-methylcytidine-3'-phosphate
  modified_base 12: mod_base = OTHER; note = 2'-O-methylguanosine-3'-phosphate
  modified_base 13: mod_base = OTHER; note = 2'-O-methyladenosine-3'-phosphate
  modified_base 14: mod_base = OTHER; note = 2'-deoxy-2'-fluorouridine-3'-phosphate
  modified_base 15: mod_base = OTHER; note = 2'-O-methylguanosine-3'-phosphate
  modified_base 16: mod_base = OTHER; note = 2'-deoxy-2'-fluoroadenosine-3'-phosphate
  modified_base 17: mod_base = OTHER; note = 2'-O-methylcytidine-3'-phosphate
  modified_base 18: mod_base = OTHER; note = 2'-O-methylcytidine-3'-phosphate
  modified_base 19: mod_base = OTHER; note = 2'-O-methyluridine-3'-phosphate
  modified_base 20: mod_base = OTHER; note = 2'-O-methylguanosine-3'-phosphate
  modified_base 21: mod_base = OTHER; note = 2'-O-methylguanosine-3'-phosphorothioate
  modified_base 22: mod_base = OTHER; note = 2'-O-methyluridine-3'-phosphorothioate
  modified_base 23: mod_base = OTHER; note = 2'-O-methylcytidine
tagcgctgcacgatgacctggtc

SEQ ID NO: 488 - RNA, 23 nt, synthetic construct
  source 1..23: mol_type = other RNA
  modified_base 1: mod_base = OTHER; note = 2'-O-methyluridine-3'-phosphorothioate 5'-(E)-Vinylphosphonate
  modified_base 2: mod_base = OTHER; note = 2'-deoxy-2'-fluoroadenosine-3'-phosphorothioate
  modified_base 3: mod_base = OTHER; note = 2'-O-methyluridine-3'-phosphate
  modified_base 4: mod_base = OTHER; note = 2'-O-methylguanosine-3'-phosphate
  modified_base 5: mod_base = OTHER; note = 2'-O-methyluridine-3'-phosphate
  modified_base 6: mod_base = OTHER; note = 2'-deoxy-2'-fluoroguanosine-3'-phosphate
  modified_base 7: mod_base = OTHER; note = 2'-O-methylguanosine-3'-phosphate
  modified_base 8: mod_base = OTHER; note = 2'-deoxy-2'-fluoroguanosine-3'-phosphate
  modified_base 9: mod_base = OTHER; note = 2'-deoxy-2'-fluorouridine-3'-phosphate
  modified_base 10: mod_base = OTHER; note = 2'-O-methylcytidine-3'-phosphate
  modified_base 11: mod_base = OTHER; note = 2'-O-methyladenosine-3'-phosphate
  modified_base 12: mod_base = OTHER; note = 2'-O-methylguanosine-3'-phosphate
  modified_base 13: mod_base = OTHER; note = 2'-O-methylguanosine-3'-phosphate
  modified_base 14: mod_base = OTHER; note = 2'-deoxy-2'-fluorocytidine-3'-phosphate
  modified_base 15: mod_base = OTHER; note = 2'-O-methyluridine-3'-phosphate
  modified_base 16: mod_base = OTHER; note = 2'-deoxy-2'-fluorocytidine-3'-phosphate
  modified_base 17: mod_base = OTHER; note = 2'-O-methyluridine-3'-phosphate
  modified_base 18: mod_base = OTHER; note = 2'-O-methyluridine-3'-phosphate
  modified_base 19: mod_base = OTHER; note = 2'-O-methylcytidine-3'-phosphate
  modified_base 20: mod_base = OTHER; note = 2'-O-methylcytidine-3'-phosphate
  modified_base 21: mod_base = OTHER; note = 2'-O-methylcytidine-3'-phosphorothioate
  modified_base 22: mod_base = OTHER; note = 2'-O-methylguanosine-3'-phosphorothioate
  modified_base 23: mod_base = OTHER; note = 2'-O-methylguanosine
tatgtgggtcaggctcttcccgg

SEQ ID NO: 489 - RNA, 23 nt, synthetic construct
  source 1..23: mol_type = other RNA
  modified_base 1: mod_base = OTHER; note = 2'-O-methyluridine-3'-phosphorothioate 5'-(E)-Vinylphosphonate
  modified_base 2: mod_base = OTHER; note = 2'-deoxy-2'-fluoroadenosine-3'-phosphorothioate
  modified_base 3: mod_base = OTHER; note = 2'-O-methylguanosine-3'-phosphate
  modified_base 4: mod_base = OTHER; note = 2'-O-methylcytidine-3'-phosphate
  modified_base 5: mod_base = OTHER; note = 2'-O-methylcytidine-3'-phosphate
  modified_base 6: mod_base = OTHER; note = 2'-deoxy-2'-fluorocytidine-3'-phosphate
  modified_base 7: mod_base = OTHER; note = 2'-O-methylguanosine-3'-phosphate
  modified_base 8: mod_base = OTHER; note = 2'-deoxy-2'-fluorocytidine-3'-phosphate
  modified_base 9: mod_base = OTHER; note = 2'-deoxy-2'-fluorocytidine-3'-phosphate
  modified_base 10: mod_base = OTHER; note = 2'-O-methyluridine-3'-phosphate
  modified_base 11: mod_base = OTHER; note = 2'-O-methyluridine-3'-phosphate
  modified_base 12: mod_base = OTHER; note = 2'-O-methylguanosine-3'-phosphate
  modified_base 13: mod_base = OTHER; note = 2'-O-methyladenosine-3'-phosphate
  modified_base 14: mod_base = OTHER; note = 2'-deoxy-2'-fluorouridine-3'-phosphate
  modified_base 15: mod_base = OTHER; note = 2'-O-methylguanosine-3'-phosphate
  modified_base 16: mod_base = OTHER; note = 2'-deoxy-2'-fluorouridine-3'-phosphate
  modified_base 17: mod_base = OTHER; note = 2'-O-methylguanosine-3'-phosphate
  modified_base 18: mod_base = OTHER; note = 2'-O-methylguanosine-3'-phosphate
  modified_base 19: mod_base = OTHER; note = 2'-O-methylguanosine-3'-phosphate
  modified_base 20: mod_base = OTHER; note = 2'-O-methyluridine-3'-phosphate
  modified_base 21: mod_base = OTHER; note = 2'-O-methylcytidine-3'-phosphorothioate
  modified_base 22: mod_base = OTHER; note = 2'-O-methyladenosine-3'-phosphorothioate
  modified_base 23: mod_base = OTHER; note = 2'-O-methylguanosine
tagcccgccttgatgtgggtcag

SEQ ID NO: 490 - RNA, 23 nt, synthetic construct
  source 1..23: mol_type = other RNA
  modified_base 1: mod_base = OTHER; note = 2'-O-methyluridine-3'-phosphorothioate 5'-(E)-Vinylphosphonate
  modified_base 2: mod_base = OTHER; note = 2'-deoxy-2'-fluoroguanosine-3'-phosphorothioate
  modified_base 3: mod_base = OTHER; note = 2'-O-methyluridine-3'-phosphate
  modified_base 4: mod_base = OTHER; note = 2'-O-methyladenosine-3'-phosphate
  modified_base 5: mod_base = OTHER; note = 2'-O-methylcytidine-3'-phosphate
  modified_base 6: mod_base = OTHER; note = 2'-deoxy-2'-fluorocytidine-3'-phosphate
  modified_base 7: mod_base = OTHER; note = 2'-O-methylcytidine-3'-phosphate
  modified_base 8: mod_base = OTHER; note = 2'-deoxy-2'-fluoroadenosine-3'-phosphate
  modified_base 9: mod_base = OTHER; note = 2'-deoxy-2'-fluorocytidine-3'-phosphate
  modified_base 10: mod_base = OTHER; note = 2'-O-methyladenosine-3'-phosphate
  modified_base 11: mod_base = OTHER; note = 2'-O-methylcytidine-3'-phosphate
  modified_base 12: mod_base = OTHER; note = 2'-O-methyladenosine-3'-phosphate
  modified_base 13: mod_base = OTHER; note = 2'-O-methylguanosine-3'-phosphate
  modified_base 14: mod_base = OTHER; note = 2'-deoxy-2'-fluoroguanosine-3'-phosphate
  modified_base 15: mod_base = OTHER; note = 2'-O-methyladenosine-3'-phosphate
  modified_base 16: mod_base = OTHER; note = 2'-deoxy-2'-fluorouridine-3'-phosphate
  modified_base 17: mod_base = OTHER; note = 2'-O-methylguanosine-3'-phosphate
  modified_base 18: mod_base = OTHER; note = 2'-O-methylcytidine-3'-phosphate
  modified_base 19: mod_base = OTHER; note = 2'-O-methyladenosine-3'-phosphate
  modified_base 20: mod_base = OTHER; note = 2'-O-methylguanosine-3'-phosphate
  modified_base 21: mod_base = OTHER; note = 2'-O-methylcytidine-3'-phosphorothioate
  modified_base 22: mod_base = OTHER; note = 2'-O-methylcytidine-3'-phosphorothioate
  modified_base 23: mod_base = OTHER; note = 2'-O-methylcytidine
tgtacccacacaggatgcagccc

SEQ ID NO: 491 - RNA, 23 nt, synthetic construct
  source 1..23: mol_type = other RNA
  modified_base 1: mod_base = OTHER; note = 2'-O-methyluridine-3'-phosphorothioate 5'-(E)-Vinylphosphonate
  modified_base 2: mod_base = OTHER; note = 2'-deoxy-2'-fluoroadenosine-3'-phosphorothioate
  modified_base 3: mod_base = OTHER; note = 2'-O-methyluridine-3'-phosphate
  modified_base 4: mod_base = OTHER; note = 2'-O-methylguanosine-3'-phosphate
  modified_base 5: mod_base = OTHER; note = 2'-O-methylguanosine-3'-phosphate
  modified_base 6: mod_base = OTHER; note = 2'-deoxy-2'-fluoroguanosine-3'-phosphate
  modified_base 7: mod_base = OTHER; note = 2'-O-methylcytidine-3'-phosphate
  modified_base 8: mod_base = OTHER; note = 2'-deoxy-2'-fluoroguanosine-3'-phosphate
  modified_base 9: mod_base = OTHER; note = 2'-deoxy-2'-fluorouridine-3'-phosphate
  modified_base 10: mod_base = OTHER; note = 2'-O-methylcytidine-3'-phosphate
  modified_base 11: mod_base = OTHER; note = 2'-O-methyladenosine-3'-phosphate
  modified_base 12: mod_base = OTHER; note = 2'-O-methylguanosine-3'-phosphate
  modified_base 13: mod_base = OTHER; note = 2'-O-methylcytidine-3'-phosphate
  modified_base 14: mod_base = OTHER; note = 2'-deoxy-2'-fluorouridine-3'-phosphate
  modified_base 15: mod_base = OTHER; note = 2'-O-methyluridine-3'-phosphate
  modified_base 16: mod_base = OTHER; note = 2'-deoxy-2'-fluorocytidine-3'-phosphate
  modified_base 17: mod_base = OTHER; note = 2'-O-methyladenosine-3'-phosphate
  modified_base 18: mod_base = OTHER; note = 2'-O-methylguanosine-3'-phosphate
  modified_base 19: mod_base = OTHER; note = 2'-O-methylguanosine-3'-phosphate
  modified_base 20: mod_base = OTHER; note = 2'-O-methyluridine-3'-phosphate
  modified_base 21: mod_base = OTHER; note = 2'-O-methyladenosine-3'-phosphorothioate
  modified_base 22: mod_base = OTHER; note = 2'-O-methylcytidine-3'-phosphorothioate
  modified_base 23: mod_base = OTHER; note = 2'-O-methylcytidine
tatgggcgtcagcttcaggtacc

SEQ ID NO: 492 - RNA, 23 nt, synthetic construct
  source 1..23: mol_type = other RNA
  modified_base 1: mod_base = OTHER; note = 2'-O-methyluridine-3'-phosphorothioate 5'-(E)-Vinylphosphonate
  modified_base 2: mod_base = OTHER; note = 2'-deoxy-2'-fluorouridine-3'-phosphorothioate
  modified_base 3: mod_base = OTHER; note = 2'-O-methylguanosine-3'-phosphate
  modified_base 4: mod_base = OTHER; note = 2'-O-methyladenosine-3'-phosphate
  modified_base 5: mod_base = OTHER; note = 2'-O-methylcytidine-3'-phosphate
  modified_base 6: mod_base = OTHER; note = 2'-deoxy-2'-fluorocytidine-3'-phosphate
  modified_base 7: mod_base = OTHER; note = 2'-O-methyladenosine-3'-phosphate
  modified_base 8: mod_base = OTHER; note = 2'-deoxy-2'-fluorouridine-3'-phosphate
  modified_base 9: mod_base = OTHER; note = 2'-deoxy-2'-fluoroguanosine-3'-phosphate
  modified_base 10: mod_base = OTHER; note = 2'-O-methyladenosine-3'-phosphate
  modified_base 11: mod_base = OTHER; note = 2'-O-methylguanosine-3'-phosphate
  modified_base 12: mod_base = OTHER; note = 2'-O-methyladenosine-3'-phosphate
  modified_base 13: mod_base = OTHER; note = 2'-O-methyladenosine-3'-phosphate
  modified_base 14: mod_base = OTHER; note = 2'-deoxy-2'-fluoroadenosine-3'-phosphate
  modified_base 15: mod_base = OTHER; note = 2'-O-methylcytidine-3'-phosphate
  modified_base 16: mod_base = OTHER; note = 2'-deoxy-2'-fluoroadenosine-3'-phosphate
  modified_base 17: mod_base = OTHER; note = 2'-O-methyluridine-3'-phosphate
  modified_base 18: mod_base = OTHER; note = 2'-O-methylguanosine-3'-phosphate
  modified_base 19: mod_base = OTHER; note = 2'-O-methylguanosine-3'-phosphate
  modified_base 20: mod_base = OTHER; note = 2'-O-methylguanosine-3'-phosphate
  modified_base 21: mod_base = OTHER; note = 2'-O-methylcytidine-3'-phosphorothioate
  modified_base 22: mod_base = OTHER; note = 2'-O-methylguanosine-3'-phosphorothioate
  modified_base 23: mod_base = OTHER; note = 2'-O-methyluridine
ttgaccatgagaaacatgggcgt

SEQ ID NO: 493 - RNA, 23 nt, synthetic construct
  source 1..23: mol_type = other RNA
  modified_base 1: mod_base = OTHER; note = 2'-O-methyluridine-3'-phosphorothioate 5'-(E)-Vinylphosphonate
  modified_base 2: mod_base = OTHER; note = 2'-deoxy-2'-fluorocytidine-3'-phosphorothioate
  modified_base 3: mod_base = OTHER; note = 2'-O-methyluridine-3'-phosphate
  modified_base 4: mod_base = OTHER; note = 2'-O-methylguanosine-3'-phosphate
  modified_base 5: mod_base = OTHER; note = 2'-O-methyladenosine-3'-phosphate
  modified_base 6: mod_base = OTHER; note = 2'-deoxy-2'-fluorouridine-3'-phosphate
  modified_base 7: mod_base = OTHER; note = 2'-O-methylcytidine-3'-phosphate
  modified_base 8: mod_base = OTHER; note = 2'-deoxy-2'-fluoroadenosine-3'-phosphate
  modified_base 9: mod_base = OTHER; note = 2'-deoxy-2'-fluorouridine-3'-phosphate
  modified_base 10: mod_base = OTHER; note = 2'-O-methylguanosine-3'-phosphate
  modified_base 11: mod_base = OTHER; note = 2'-O-methylcytidine-3'-phosphate
  modified_base 12: mod_base = OTHER; note = 2'-O-methylcytidine-3'-phosphate
  modified_base 13: mod_base = OTHER; note = 2'-O-methyluridine-3'-phosphate
  modified_base 14: mod_base = OTHER; note = 2'-deoxy-2'-fluoroguanosine-3'-phosphate
  modified_base 15: mod_base = OTHER; note = 2'-O-methylguanosine-3'-phosphate
  modified_base 16: mod_base = OTHER; note = 2'-deoxy-2'-fluorocytidine-3'-phosphate
  modified_base 17: mod_base = OTHER; note = 2'-O-methyladenosine-3'-phosphate
  modified_base 18: mod_base = OTHER; note = 2'-O-methyluridine-3'-phosphate
  modified_base 19: mod_base = OTHER; note = 2'-O-methylguanosine-3'-phosphate
  modified_base 20: mod_base = OTHER; note = 2'-O-methyladenosine-3'-phosphate
  modified_base 21: mod_base = OTHER; note = 2'-O-methylcytidine-3'-phosphorothioate
  modified_base 22: mod_base = OTHER; note = 2'-O-methylcytidine-3'-phosphorothioate
  modified_base 23: mod_base = OTHER; note = 2'-O-methyladenosine
tctgatcatgcctggcatgacca

SEQ ID NO: 494 - RNA, 23 nt, synthetic construct
  source 1..23: mol_type = other RNA
  modified_base 1: mod_base = OTHER; note = 2'-O-methyluridine-3'-phosphorothioate 5'-(E)-Vinylphosphonate
  modified_base 2: mod_base = OTHER; note = 2'-deoxy-2'-fluoroadenosine-3'-phosphorothioate
  modified_base 3: mod_base = OTHER; note = 2'-O-methylguanosine-3'-phosphate
  modified_base 4: mod_base = OTHER; note = 2'-O-methyladenosine-3'-phosphate
  modified_base 5: mod_base = OTHER; note = 2'-O-methyladenosine-3'-phosphate
  modified_base 6: mod_base = OTHER; note = 2'-deoxy-2'-fluorouridine-3'-phosphate
  modified_base 7: mod_base = OTHER; note = 2'-O-methylguanosine-3'-phosphate
  modified_base 8: mod_base = OTHER; note = 2'-deoxy-2'-fluorocytidine-3'-phosphate
  modified_base 9: mod_base = OTHER; note = 2'-deoxy-2'-fluoroguanosine-3'-phosphate
  modified_base 10: mod_base = OTHER; note = 2'-O-methylguanosine-3'-phosphate
  modified_base 11: mod_base = OTHER; note = 2'-O-methylcytidine-3'-phosphate
  modified_base 12: mod_base = OTHER; note = 2'-O-methyluridine-3'-phosphate
  modified_base 13: mod_base = OTHER; note = 2'-O-methylguanosine-3'-phosphate
  modified_base 14: mod_base = OTHER; note = 2'-deoxy-2'-fluoroadenosine-3'-phosphate
  modified_base 15: mod_base = OTHER; note = 2'-O-methyluridine-3'-phosphate
  modified_base 16: mod_base = OTHER; note = 2'-deoxy-2'-fluorocytidine-3'-phosphate
  modified_base 17: mod_base = OTHER; note = 2'-O-methyladenosine-3'-phosphate
  modified_base 18: mod_base = OTHER; note = 2'-O-methyluridine-3'-phosphate
  modified_base 19: mod_base = OTHER; note = 2'-O-methylguanosine-3'-phosphate
  modified_base 20: mod_base = OTHER; note = 2'-O-methylcytidine-3'-phosphate
  modified_base 21: mod_base = OTHER; note = 2'-O-methylcytidine-3'-phosphorothioate
  modified_base 22: mod_base = OTHER; note = 2'-O-methyluridine-3'-phosphorothioate
  modified_base 23: mod_base = OTHER; note = 2'-O-methylguanosine
tagaatgcggctgatcatgcctg

SEQ ID NO: 495 - RNA, 23 nt, synthetic construct
  source 1..23: mol_type = other RNA
  modified_base 1: mod_base = OTHER; note = 2'-O-methyluridine-3'-phosphorothioate 5'-(E)-Vinylphosphonate
  modified_base 2: mod_base = OTHER; note = 2'-deoxy-2'-fluorouridine-3'-phosphorothioate
  modified_base 3: mod_base = OTHER; note = 2'-O-methylcytidine-3'-phosphate
  modified_base 4: mod_base = OTHER; note = 2'-O-methyluridine-3'-phosphate
  modified_base 5: mod_base = OTHER; note = 2'-O-methylguanosine-3'-phosphate
  modified_base 6: mod_base = OTHER; note = 2'-deoxy-2'-fluoroguanosine-3'-phosphate
  modified_base 7: mod_base = OTHER; note = 2'-O-methylguanosine-3'-phosphate
  modified_base 8: mod_base = OTHER; note = 2'-deoxy-2'-fluorouridine-3'-phosphate
  modified_base 9: mod_base = OTHER; note = 2'-deoxy-2'-fluoroadenosine-3'-phosphate
  modified_base 10: mod_base = OTHER; note = 2'-O-methylcytidine-3'-phosphate
  modified_base 11: mod_base = OTHER; note = 2'-O-methyladenosine-3'-phosphate
  modified_base 12: mod_base = OTHER; note = 2'-O-methylguanosine-3'-phosphate
  modified_base 13: mod_base = OTHER; note = 2'-O-methyladenosine-3'-phosphate
  modified_base 14: mod_base = OTHER; note = 2'-deoxy-2'-fluoroadenosine-3'-phosphate
  modified_base 15: mod_base = OTHER; note = 2'-O-methyluridine-3'-phosphate
  modified_base 16: mod_base = OTHER; note = 2'-deoxy-2'-fluoroguanosine-3'-phosphate
  modified_base 17: mod_base = OTHER; note = 2'-O-methylcytidine-3'-phosphate
  modified_base 18: mod_base = OTHER; note = 2'-O-methylguanosine-3'-phosphate
  modified_base 19: mod_base = OTHER; note = 2'-O-methylguanosine-3'-phosphate
  modified_base 20: mod_base = OTHER; note = 2'-O-methylcytidine-3'-phosphate
  modified_base 21: mod_base = OTHER; note = 2'-O-methyluridine-3'-phosphorothioate
  modified_base 22: mod_base = OTHER; note = 2'-O-methylguanosine-3'-phosphorothioate
  modified_base 23: mod_base = OTHER; note = 2'-O-methyladenosine
ttctgggtacagaatgcggctga

SEQ ID NO: 496 - RNA, 23 nt, synthetic construct
  source 1..23: mol_type = other RNA
  modified_base 1: mod_base = OTHER; note = 2'-O-methyluridine-3'-phosphorothioate 5'-(E)-Vinylphosphonate
  modified_base 2: mod_base = OTHER; note = 2'-deoxy-2'-fluoroadenosine-3'-phosphorothioate
  modified_base 3: mod_base = OTHER; note = 2'-O-methylcytidine-3'-phosphate
  modified_base 4: mod_base = OTHER; note = 2'-O-methylguanosine-3'-phosphate
  modified_base 5: mod_base = OTHER; note = 2'-O-methylcytidine-3'-phosphate
  modified_base 6: mod_base = OTHER; note = 2'-deoxy-2'-fluorocytidine-3'-phosphate
  modified_base 7: mod_base = OTHER; note = 2'-O-methyladenosine-3'-phosphate
  modified_base 8: mod_base = OTHER; note = 2'-deoxy-2'-fluorocytidine-3'-phosphate
  modified_base 9: mod_base = OTHER; note = 2'-deoxy-2'-fluorocytidine-3'-phosphate
  modified_base 10: mod_base = OTHER; note = 2'-O-methyluridine-3'-phosphate
  modified_base 11: mod_base = OTHER; note = 2'-O-methylcytidine-3'-phosphate
  modified_base 12: mod_base = OTHER; note = 2'-O-methylguanosine-3'-phosphate
  modified_base 13: mod_base = OTHER; note = 2'-O-methyluridine-3'-phosphate
  modified_base 14: mod_base = OTHER; note = 2'-deoxy-2'-fluorocytidine-3'-phosphate
  modified_base 15: mod_base = OTHER; note = 2'-O-methyluridine-3'-phosphate
  modified_base 16: mod_base = OTHER; note = 2'-deoxy-2'-fluoroguanosine-3'-phosphate
  modified_base 17: mod_base = OTHER; note = 2'-O-methylguanosine-3'-phosphate
  modified_base 18: mod_base = OTHER; note = 2'-O-methylguanosine-3'-phosphate
  modified_base 19: mod_base = OTHER; note = 2'-O-methyluridine-3'-phosphate
  modified_base 20: mod_base = OTHER; note = 2'-O-methyladenosine-3'-phosphate
  modified_base 21: mod_base = OTHER; note = 2'-O-methylcytidine-3'-phosphorothioate
  modified_base 22: mod_base = OTHER; note = 2'-O-methyladenosine-3'-phosphorothioate
  modified_base 23: mod_base = OTHER; note = 2'-O-methylguanosine
tacgccacctcgtctgggtacag

SEQ ID NO: 497 - RNA, 23 nt, synthetic construct
  source 1..23: mol_type = other RNA
  modified_base 1: mod_base = OTHER; note = 2'-O-methyluridine-3'-phosphorothioate 5'-(E)-Vinylphosphonate
  modified_base 2: mod_base = OTHER; note = 2'-deoxy-2'-fluoroguanosine-3'-phosphorothioate
  modified_base 3: mod_base = OTHER; note = 2'-O-methyladenosine-3'-phosphate
  modified_base 4: mod_base = OTHER; note = 2'-O-methyluridine-3'-phosphate
  modified_base 5: mod_base = OTHER; note = 2'-O-methylguanosine-3'-phosphate
  modified_base 6: mod_base = OTHER; note = 2'-deoxy-2'-fluorouridine-3'-phosphate
  modified_base 7: mod_base = OTHER; note = 2'-O-methyluridine-3'-phosphate
  modified_base 8: mod_base = OTHER; note = 2'-deoxy-2'-fluoroguanosine-3'-phosphate
  modified_base 9: mod_base = OTHER; note = 2'-deoxy-2'-fluoroguanosine-3'-phosphate
  modified_base 10: mod_base = OTHER; note = 2'-O-methyladenosine-3'-phosphate
  modified_base 11: mod_base = OTHER; note = 2'-O-methylguanosine-3'-phosphate
  modified_base 12: mod_base = OTHER; note = 2'-O-methylcytidine-3'-phosphate
  modified_base 13: mod_base = OTHER; note = 2'-O-methyladenosine-3'-phosphate
  modified_base 14: mod_base = OTHER; note = 2'-deoxy-2'-fluoroguanosine-3'-phosphate
  modified_base 15: mod_base = OTHER; note = 2'-O-methylcytidine-3'-phosphate
  modified_base 16: mod_base = OTHER; note = 2'-deoxy-2'-fluorocytidine-3'-phosphate
  modified_base 17: mod_base = OTHER; note = 2'-O-methylcytidine-3'-phosphate
  modified_base 18: mod_base = OTHER; note = 2'-O-methyladenosine-3'-phosphate
  modified_base 19: mod_base = OTHER; note = 2'-O-methylcytidine-3'-phosphate
  modified_base 20: mod_base = OTHER; note = 2'-O-methylcytidine-3'-phosphate
  modified_base 21: mod_base = OTHER; note = 2'-O-methyluridine-3'-phosphorothioate
  modified_base 22: mod_base = OTHER; note = 2'-O-methylcytidine-3'-phosphorothioate
  modified_base 23: mod_base = OTHER; note = 2'-O-methylcytidine
tgatgttggagcagcccacctcc

SEQ ID NO: 498 - RNA, 23 nt, synthetic construct
  source 1..23: mol_type = other RNA
  modified_base 1: mod_base = OTHER; note = 2'-O-methyluridine-3'-phosphorothioate 5'-(E)-Vinylphosphonate
  modified_base 2: mod_base = OTHER; note = 2'-deoxy-2'-fluorocytidine-3'-phosphorothioate
  modified_base 3: mod_base = OTHER; note = 2'-O-methylguanosine-3'-phosphate
  modified_base 4: mod_base = OTHER; note = 2'-O-methylguanosine-3'-phosphate
  modified_base 5: mod_base = OTHER; note = 2'-O-methylguanosine-3'-phosphate
  modified_base 6: mod_base = OTHER; note = 2'-deoxy-2'-fluorouridine-3'-phosphate
  modified_base 7: mod_base = OTHER; note = 2'-O-methyladenosine-3'-phosphate
  modified_base 8: mod_base = OTHER; note = 2'-deoxy-2'-fluoroguanosine-3'-phosphate
  modified_base 9: mod_base = OTHER; note = 2'-deoxy-2'-fluoroguanosine-3'-phosphate
  modified_base 10: mod_base = OTHER; note = 2'-O-methylcytidine-3'-phosphate
  modified_base 11: mod_base = OTHER; note = 2'-O-methylguanosine-3'-phosphate
  modified_base 12: mod_base = OTHER; note = 2'-O-methyladenosine-3'-phosphate
  modified_base 13: mod_base = OTHER; note = 2'-O-methyluridine-3'-phosphate
  modified_base 14: mod_base = OTHER; note = 2'-deoxy-2'-fluoroguanosine-3'-phosphate
  modified_base 15: mod_base = OTHER; note = 2'-O-methyluridine-3'-phosphate
  modified_base 16: mod_base = OTHER; note = 2'-deoxy-2'-fluorouridine-3'-phosphate
  modified_base 17: mod_base = OTHER; note = 2'-O-methylguanosine-3'-phosphate
  modified_base 18: mod_base = OTHER; note = 2'-O-methylguanosine-3'-phosphate
  modified_base 19: mod_base = OTHER; note = 2'-O-methyladenosine-3'-phosphate
  modified_base 20: mod_base = OTHER; note = 2'-O-methylguanosine-3'-phosphate
  modified_base 21: mod_base = OTHER; note = 2'-O-methylcytidine-3'-phosphorothioate
  modified_base 22: mod_base = OTHER; note = 2'-O-methyladenosine-3'-phosphorothioate
  modified_base 23: mod_base = OTHER; note = 2'-O-methylguanosine
tcgggtaggcgatgttggagcag

SEQ ID NO: 499 - RNA, 23 nt, synthetic construct
  source 1..23: mol_type = other RNA
  modified_base 1: mod_base = OTHER; note = 2'-O-methyluridine-3'-phosphorothioate 5'-(E)-Vinylphosphonate
  modified_base 2: mod_base = OTHER; note = 2'-deoxy-2'-fluoroguanosine-3'-phosphorothioate
  modified_base 3: mod_base = OTHER; note = 2'-O-methylguanosine-3'-phosphate
  modified_base 4: mod_base = OTHER; note = 2'-O-methylcytidine-3'-phosphate
  modified_base 5: mod_base = OTHER; note = 2'-O-methyladenosine-3'-phosphate
  modified_base 6: mod_base = OTHER; note = 2'-deoxy-2'-fluorouridine-3'-phosphate
  modified_base 7: mod_base = OTHER; note = 2'-O-methylguanosine-3'-phosphate
  modified_base 8: mod_base = OTHER; note = 2'-deoxy-2'-fluoroadenosine-3'-phosphate
  modified_base 9: mod_base = OTHER; note = 2'-deoxy-2'-fluoroguanosine-3'-phosphate
  modified_base 10: mod_base = OTHER; note = 2'-O-methylcytidine-3'-phosphate
  modified_base 11: mod_base = OTHER; note = 2'-O-methyluridine-3'-phosphate
  modified_base 12: mod_base = OTHER; note = 2'-O-methyluridine-3'-phosphate
  modified_base 13: mod_base = OTHER; note = 2'-O-methylcytidine-3'-phosphate
  modified_base 14: mod_base = OTHER; note = 2'-deoxy-2'-fluoroadenosine-3'-phosphate
  modified_base 15: mod_base = OTHER; note = 2'-O-methylcytidine-3'-phosphate
  modified_base 16: mod_base = OTHER; note = 2'-deoxy-2'-fluoroguanosine-3'-phosphate
  modified_base 17: mod_base = OTHER; note = 2'-O-methyladenosine-3'-phosphate
  modified_base 18: mod_base = OTHER; note = 2'-O-methylcytidine-3'-phosphate
  modified_base 19: mod_base = OTHER; note = 2'-O-methylguanosine-3'-phosphate
  modified_base 20: mod_base = OTHER; note = 2'-O-methyladenosine-3'-phosphate
  modified_base 21: mod_base = OTHER; note = 2'-O-methylguanosine-3'-phosphorothioate
  modified_base 22: mod_base = OTHER; note = 2'-O-methylcytidine-3'-phosphorothioate
  modified_base 23: mod_base = OTHER; note = 2'-O-methylcytidine
tggcatgagcttcacgacgagcc

SEQ ID NO: 500 - RNA, 23 nt, synthetic construct
  source 1..23: mol_type = other RNA
  modified_base 1: mod_base = OTHER; note = 2'-O-methyluridine-3'-phosphorothioate 5'-(E)-Vinylphosphonate
  modified_base 2: mod_base = OTHER; note = 2'-deoxy-2'-fluoroadenosine-3'-phosphorothioate
  modified_base 3: mod_base = OTHER; note = 2'-O-methylguanosine-3'-phosphate
  modified_base 4: mod_base = OTHER; note = 2'-O-methyladenosine-3'-phosphate
  modified_base 5: mod_base = OTHER; note = 2'-O-methylcytidine-3'-phosphate
  modified_base 6: mod_base = OTHER; note = 2'-deoxy-2'-fluorocytidine-3'-phosphate
  modified_base 7: mod_base = OTHER; note = 2'-O-methylguanosine-3'-phosphate
  modified_base 8: mod_base = OTHER; note = 2'-deoxy-2'-fluorouridine-3'-phosphate
  modified_base 9: mod_base = OTHER; note = 2'-deoxy-2'-fluorouridine-3'-phosphate
  modified_base 10: mod_base = OTHER; note = 2'-O-methylguanosine-3'-phosphate
  modified_base 11: mod_base = OTHER; note = 2'-O-methylguanosine-3'-phosphate
  modified_base 12: mod_base = OTHER; note = 2'-O-methylguanosine-3'-phosphate
  modified_base 13: mod_base = OTHER; note = 2'-O-methylcytidine-3'-phosphate
  modified_base 14: mod_base = OTHER; note = 2'-deoxy-2'-fluoroadenosine-3'-phosphate
  modified_base 15: mod_base = OTHER; note = 2'-O-methyluridine-3'-phosphate
  modified_base 16: mod_base = OTHER; note = 2'-deoxy-2'-fluoroguanosine-3'-phosphate
  modified_base 17: mod_base = OTHER; note = 2'-O-methyladenosine-3'-phosphate
  modified_base 18: mod_base = OTHER; note = 2'-O-methylguanosine-3'-phosphate
  modified_base 19: mod_base = OTHER; note = 2'-O-methylcytidine-3'-phosphate
  modified_base 20: mod_base = OTHER; note = 2'-O-methyluridine-3'-phosphate
  modified_base 21: mod_base = OTHER; note = 2'-O-methyluridine-3'-phosphorothioate
  modified_base 22: mod_base = OTHER; note = 2'-O-methylcytidine-3'-phosphorothioate
  modified_base 23: mod_base = OTHER; note = 2'-O-methyladenosine
tagaccgttgggcatgagcttca

SEQ ID NO: 501 - RNA, 23 nt, synthetic construct
  source 1..23: mol_type = other RNA
  modified_base 1: mod_base = OTHER; note = 2'-O-methyluridine-3'-phosphorothioate 5'-(E)-Vinylphosphonate
  modified_base 2: mod_base = OTHER; note = 2'-deoxy-2'-fluoroadenosine-3'-phosphorothioate
  modified_base 3: mod_base = OTHER; note = 2'-O-methylguanosine-3'-phosphate
  modified_base 4: mod_base = OTHER; note = 2'-O-methylcytidine-3'-phosphate
  modified_base 5: mod_base = OTHER; note = 2'-O-methyladenosine-3'-phosphate
  modified_base 6: mod_base = OTHER; note = 2'-deoxy-2'-fluorouridine-3'-phosphate
  modified_base 7: mod_base = OTHER; note = 2'-O-methylguanosine-3'-phosphate
  modified_base 8: mod_base = OTHER; note = 2'-deoxy-2'-fluoroadenosine-3'-phosphate
  modified_base 9: mod_base = OTHER; note = 2'-deoxy-2'-fluoroguanosine-3'-phosphate
  modified_base 10: mod_base = OTHER; note = 2'-O-methyluridine-3'-phosphate
  modified_base 11: mod_base = OTHER; note = 2'-O-methylcytidine-3'-phosphate
  modified_base 12: mod_base = OTHER; note = 2'-O-methylcytidine-3'-phosphate
  modified_base 13: mod_base = OTHER; note = 2'-O-methylguanosine-3'-phosphate
  modified_base 14: mod_base = OTHER; note = 2'-deoxy-2'-fluorocytidine-3'-phosphate
  modified_base 15: mod_base = OTHER; note = 2'-O-methylguanosine-3'-phosphate
  modified_base 16: mod_base = OTHER; note = 2'-deoxy-2'-fluorocytidine-3'-phosphate
  modified_base 17: mod_base = OTHER; note = 2'-O-methyladenosine-3'-phosphate
  modified_base 18: mod_base = OTHER; note = 2'-O-methylguanosine-3'-phosphate
  modified_base 19: mod_base = OTHER; note = 2'-O-methyladenosine-3'-phosphate
  modified_base 20: mod_base = OTHER; note = 2'-O-methylcytidine-3'-phosphate
  modified_base 21: mod_base = OTHER; note = 2'-O-methylcytidine-3'-phosphorothioate
  modified_base 22: mod_base = OTHER; note = 2'-O-methylguanosine-3'-phosphorothioate
  modified_base 23: mod_base = OTHER; note = 2'-O-methyluridine
tagcatgagtccgcgcagaccgt

SEQ ID NO: 502 - RNA, 23 nt, synthetic construct
  source 1..23: mol_type = other RNA
  modified_base 1: mod_base = OTHER; note = 2'-O-methyluridine-3'-phosphorothioate 5'-(E)-Vinylphosphonate
  modified_base 2: mod_base = OTHER; note = 2'-deoxy-2'-fluoroadenosine-3'-phosphorothioate
  modified_base 3: mod_base = OTHER; note = 2'-O-methyluridine-3'-phosphate
  modified_base 4: mod_base = OTHER; note = 2'-O-methylguanosine-3'-phosphate
  modified_base 5: mod_base = OTHER; note = 2'-O-methyladenosine-3'-phosphate
  modified_base 6: mod_base = OTHER; note = 2'-deoxy-2'-fluorocytidine-3'-phosphate
  modified_base 7: mod_base = OTHER; note = 2'-O-methylcytidine-3'-phosphate
  modified_base 8: mod_base = OTHER; note = 2'-deoxy-2'-fluoroguanosine-3'-phosphate
  modified_base 9: mod_base = OTHER; note = 2'-deoxy-2'-fluorocytidine-3'-phosphate
  modified_base 10: mod_base = OTHER; note = 2'-O-methylcytidine-3'-phosphate
  modified_base 11: mod_base = OTHER; note = 2'-O-methyladenosine-3'-phosphate
  modified_base 12: mod_base = OTHER; note = 2'-O-methylguanosine-3'-phosphate
  modified_base 13: mod_base = OTHER; note = 2'-O-methylcytidine-3'-phosphate
  modified_base 14: mod_base = OTHER; note = 2'-deoxy-2'-fluoroadenosine-3'-phosphate
  modified_base 15: mod_base = OTHER; note = 2'-O-methyluridine-3'-phosphate
  modified_base 16: mod_base = OTHER; note = 2'-deoxy-2'-fluoroguanosine-3'-phosphate
  modified_base 17: mod_base = OTHER; note = 2'-O-methyladenosine-3'-phosphate
  modified_base 18: mod_base = OTHER; note = 2'-O-methylguanosine-3'-phosphate
  modified_base 19: mod_base = OTHER; note = 2'-O-methyluridine-3'-phosphate
  modified_base 20: mod_base = OTHER; note = 2'-O-methylcytidine-3'-phosphate
  modified_base 21: mod_base = OTHER; note = 2'-O-methylcytidine-3'-phosphorothioate
  modified_base 22: mod_base = OTHER; note = 2'-O-methylguanosine-3'-phosphorothioate
  modified_base 23: mod_base = OTHER; note = 2'-O-methylcytidine
tatgaccgccagcatgagtccgc

SEQ ID NO: 503 - RNA, 23 nt, synthetic construct
  source 1..23: mol_type = other RNA
  modified_base 1: mod_base = OTHER; note = 2'-O-methyluridine-3'-phosphorothioate 5'-(E)-Vinylphosphonate
  modified_base 2: mod_base = OTHER; note = 2'-deoxy-2'-fluoroadenosine-3'-phosphorothioate
  modified_base 3: mod_base = OTHER; note = 2'-O-methylguanosine-3'-phosphate
  modified_base 4: mod_base = OTHER; note = 2'-O-methylguanosine-3'-phosphate
  modified_base 5: mod_base = OTHER; note = 2'-O-methyladenosine-3'-phosphate
  modified_base 6: mod_base = OTHER; note = 2'-deoxy-2'-fluorocytidine-3'-phosphate
  modified_base 7: mod_base = OTHER; note = 2'-O-methyladenosine-3'-phosphate
  modified_base 8: mod_base = OTHER; note = 2'-deoxy-2'-fluorouridine-3'-phosphate
  modified_base 9: mod_base = OTHER; note = 2'-deoxy-2'-fluoroguanosine-3'-phosphate
  modified_base 10: mod_base = OTHER; note = 2'-O-methyladenosine-3'-phosphate
  modified_base 11: mod_base = OTHER; note = 2'-O-methylguanosine-3'-phosphate
  modified_base 12: mod_base = OTHER; note = 2'-O-methylcytidine-3'-phosphate
  modified_base 13: mod_base = OTHER; note = 2'-O-methylguanosine-3'-phosphate
  modified_base 14: mod_base = OTHER; note = 2'-deoxy-2'-fluorocytidine-3'-phosphate
  modified_base 15: mod_base = OTHER; note = 2'-O-methylguanosine-3'-phosphate
  modified_base 16: mod_base = OTHER; note = 2'-deoxy-2'-fluoroguanosine-3'-phosphate
  modified_base 17: mod_base = OTHER; note = 2'-O-methylcytidine-3'-phosphate
  modified_base 18: mod_base = OTHER; note = 2'-O-methylcytidine-3'-phosphate
  modified_base 19: mod_base = OTHER; note = 2'-O-methyladenosine-3'-phosphate
  modified_base 20: mod_base = OTHER; note = 2'-O-methylguanosine-3'-phosphate
  modified_base 21: mod_base = OTHER; note = 2'-O-methylcytidine-3'-phosphorothioate
  modified_base 22: mod_base = OTHER; note = 2'-O-methyladenosine-3'-phosphorothioate
  modified_base 23: mod_base = OTHER; note = 2'-O-methyluridine
taggacatgagcgcggccagcat

SEQ ID NO: 504 - RNA, 23 nt, synthetic construct
  source 1..23: mol_type = other RNA
  modified_base 1: mod_base = OTHER; note = 2'-O-methyluridine-3'-phosphorothioate 5'-(E)-Vinylphosphonate
  modified_base 2: mod_base = OTHER; note = 2'-deoxy-2'-fluoroadenosine-3'-phosphorothioate
  modified_base 3: mod_base = OTHER; note = 2'-O-methylguanosine-3'-phosphate
  modified_base 4: mod_base = OTHER; note = 2'-O-methyladenosine-3'-phosphate
  modified_base 5: mod_base = OTHER; note = 2'-O-methyluridine-3'-phosphate
  modified_base 6: mod_base = OTHER; note = 2'-deoxy-2'-fluoroguanosine-3'-phosphate
  modified_base 7: mod_base = OTHER; note = 2'-O-methylguanosine-3'-phosphate
  modified_base 8: mod_base = OTHER; note = 2'-deoxy-2'-fluoroadenosine-3'-phosphate
  modified_base 9: mod_base = OTHER; note = 2'-deoxy-2'-fluoroguanosine-3'-phosphate
  modified_base 10: mod_base = OTHER; note = 2'-O-methylguanosine-3'-phosphate
  modified_base 11: mod_base = OTHER; note = 2'-O-methylcytidine-3'-phosphate
  modified_base 12: mod_base = OTHER; note = 2'-O-methylcytidine-3'-phosphate
  modified_base 13: mod_base = OTHER; note = 2'-O-methyladenosine-3'-phosphate
  modified_base 14: mod_base = OTHER; note = 2'-deoxy-2'-fluoroguanosine-3'-phosphate
  modified_base 15: mod_base = OTHER; note = 2'-O-methylcytidine-3'-phosphate
  modified_base 16: mod_base = OTHER; note = 2'-deoxy-2'-fluoroguanosine-3'-phosphate
  modified_base 17: mod_base = OTHER; note = 2'-O-methyladenosine-3'-phosphate
  modified_base 18: mod_base = OTHER; note = 2'-O-methylguanosine-3'-phosphate
  modified_base 19: mod_base = OTHER; note = 2'-O-methylguanosine-3'-phosphate
  modified_base 20: mod_base = OTHER; note = 2'-O-methyladenosine-3'-phosphate
  modified_base 21: mod_base = OTHER; note = 2'-O-methylcytidine-3'-phosphorothioate
  modified_base 22: mod_base = OTHER; note = 2'-O-methyladenosine-3'-phosphorothioate
  modified_base 23: mod_base = OTHER; note = 2'-O-methyluridine
tagatggaggccagcgaggacat

SEQ ID NO: 505 - RNA, 23 nt, synthetic construct
  source 1..23: mol_type = other RNA
  modified_base 1: mod_base = OTHER; note = 2'-O-methyluridine-3'-phosphorothioate 5'-(E)-Vinylphosphonate
  modified_base 2: mod_base = OTHER; note = 2'-deoxy-2'-fluorouridine-3'-phosphorothioate
  modified_base 3: mod_base = OTHER; note = 2'-O-methylguanosine-3'-phosphate
  modified_base 4: mod_base = OTHER; note = 2'-O-methylcytidine-3'-phosphate
  modified_base 5: mod_base = OTHER; note = 2'-O-methyluridine-3'-phosphate
  modified_base 6: mod_base = OTHER; note = 2'-deoxy-2'-fluoroguanosine-3'-phosphate
  modified_base 7: mod_base = OTHER; note = 2'-O-methyluridine-3'-phosphate
  modified_base 8: mod_base = OTHER; note = 2'-deoxy-2'-fluorouridine-3'-phosphate
  modified_base 9: mod_base = OTHER; note = 2'-deoxy-2'-fluoroguanosine-3'-phosphate
  modified_base 10: mod_base = OTHER; note = 2'-O-methyladenosine-3'-phosphate
  modified_base 11: mod_base = OTHER; note = 2'-O-methyladenosine-3'-phosphate
  modified_base 12: mod_base = OTHER; note = 2'-O-methylguanosine-3'-phosphate
  modified_base 13: mod_base = OTHER; note = 2'-O-methyladenosine-3'-phosphate
  modified_base 14: mod_base = OTHER; note = 2'-deoxy-2'-fluorouridine-3'-phosphate
  modified_base 15: mod_base = OTHER; note = 2'-O-methylguanosine-3'-phosphate
  modified_base 16: mod_base = OTHER; note = 2'-deoxy-2'-fluoroguanosine-3'-phosphate
  modified_base 17: mod_base = OTHER; note = 2'-O-methyladenosine-3'-phosphate
  modified_base 18: mod_base = OTHER; note = 2'-O-methylguanosine-3'-phosphate
  modified_base 19: mod_base = OTHER; note = 2'-O-methylguanosine-3'-phosphate
  modified_base 20: mod_base = OTHER; note = 2'-O-methylcytidine-3'-phosphate
  modified_base 21: mod_base = OTHER; note = 2'-O-methylcytidine-3'-phosphorothioate
  modified_base 22: mod_base = OTHER; note = 2'-O-methyladenosine-3'-phosphorothioate
  modified_base 23: mod_base = OTHER; note = 2'-O-methylguanosine
ttgctgttgaagatggaggccag

SEQ ID NO: 506 - RNA, 23 nt, synthetic construct
  source 1..23: mol_type = other RNA
  modified_base 1: mod_base = OTHER; note = 2'-O-methyluridine-3'-phosphorothioate 5'-(E)-Vinylphosphonate
  modified_base 2: mod_base = OTHER; note = 2'-deoxy-2'-fluoroguanosine-3'-phosphorothioate
  modified_base 3: mod_base = OTHER; note = 2'-O-methylcytidine-3'-phosphate
  modified_base 4: mod_base = OTHER; note = 2'-O-methylguanosine-3'-phosphate
  modified_base 5: mod_base = OTHER; note = 2'-O-methyluridine-3'-phosphate
  modified_base 6: mod_base = OTHER; note = 2'-deoxy-2'-fluoroguanosine-3'-phosphate
  modified_base 7: mod_base = OTHER; note = 2'-O-methylcytidine-3'-phosphate
  modified_base 8: mod_base = OTHER; note = 2'-deoxy-2'-fluorouridine-3'-phosphate
  modified_base 9: mod_base = OTHER; note = 2'-deoxy-2'-fluoroguanosine-3'-phosphate
  modified_base 10: mod_base = OTHER; note = 2'-O-methylcytidine-3'-phosphate
  modified_base 11: mod_base = OTHER; note = 2'-O-methyluridine-3'-phosphate
  modified_base 12: mod_base = OTHER; note = 2'-O-methylguanosine-3'-phosphate
  modified_base 13: mod_base = OTHER; note = 2'-O-methylcytidine-3'-phosphate
  modified_base 14: mod_base = OTHER; note = 2'-deoxy-2'-fluorouridine-3'-phosphate
  modified_base 15: mod_base = OTHER; note = 2'-O-methylguanosine-3'-phosphate
  modified_base 16: mod_base = OTHER; note = 2'-deoxy-2'-fluorouridine-3'-phosphate
  modified_base 17: mod_base = OTHER; note = 2'-O-methyluridine-3'-phosphate
  modified_base 18: mod_base = OTHER; note = 2'-O-methylguanosine-3'-phosphate
  modified_base 19: mod_base = OTHER; note = 2'-O-methyladenosine-3'-phosphate
  modified_base 20: mod_base = OTHER; note = 2'-O-methyladenosine-3'-phosphate
  modified_base 21: mod_base = OTHER; note = 2'-O-methylguanosine-3'-phosphorothioate
  modified_base 22: mod_base = OTHER; note = 2'-O-methyladenosine-3'-phosphorothioate
  modified_base 23: mod_base = OTHER; note = 2'-O-methyluridine
tgcgtgctgctgctgttgaagat

SEQ ID NO: 507 - RNA, 23 nt, synthetic construct
  source 1..23: mol_type = other RNA
  modified_base 1: mod_base = OTHER; note = 2'-O-methyluridine-3'-phosphorothioate 5'-(E)-Vinylphosphonate
  modified_base 2: mod_base = OTHER; note = 2'-deoxy-2'-fluorouridine-3'-phosphorothioate
  modified_base 3: mod_base = OTHER; note = 2'-O-methylguanosine-3'-phosphate
  modified_base 4: mod_base = OTHER; note = 2'-O-methylguanosine-3'-phosphate
  modified_base 5: mod_base = OTHER; note = 2'-O-methyluridine-3'-phosphate
  modified_base 6: mod_base = OTHER; note = 2'-deoxy-2'-fluoroguanosine-3'-phosphate
  modified_base 7: mod_base = OTHER; note = 2'-O-methyladenosine-3'-phosphate
  modified_base 8: mod_base = OTHER; note = 2'-deoxy-2'-fluoroadenosine-3'-phosphate
  modified_base 9: mod_base = OTHER; note = 2'-deoxy-2'-fluoroguanosine-3'-phosphate
  modified_base 10: mod_base = OTHER; note = 2'-O-methyladenosine-3'-phosphate
  modified_base 11: mod_base = OTHER; note = 2'-O-methylguanosine-3'-phosphate
  modified_base 12: mod_base = OTHER; note = 2'-O-methylcytidine-3'-phosphate
  modified_base 13: mod_base = OTHER; note = 2'-O-methylguanosine-3'-phosphate
  modified_base 14: mod_base = OTHER; note = 2'-deoxy-2'-fluorouridine-3'-phosphate
  modified_base 15: mod_base = OTHER; note = 2'-O-methylguanosine-3'-phosphate
  modified_base 16: mod_base = OTHER; note = 2'-deoxy-2'-fluorocytidine-3'-phosphate
  modified_base 17: mod_base = OTHER; note = 2'-O-methyluridine-3'-phosphate
  modified_base 18: mod_base = OTHER; note = 2'-O-methylguanosine-3'-phosphate
  modified_base 19: mod_base = OTHER; note = 2'-O-methylcytidine-3'-phosphate
  modified_base 20: mod_base = OTHER; note = 2'-O-methyluridine-3'-phosphate
  modified_base 21: mod_base = OTHER; note = 2'-O-methylguanosine-3'-phosphorothioate
  modified_base 22: mod_base = OTHER; note = 2'-O-methylcytidine-3'-phosphorothioate
  modified_base 23: mod_base = OTHER; note = 2'-O-methyluridine
ttggtgaagagcgtgctgctgct

SEQ ID NO: 508 - RNA, 23 nt, synthetic construct
  source 1..23: mol_type = other RNA
  modified_base 1: mod_base = OTHER; note = 2'-O-methyluridine-3'-phosphorothioate 5'-(E)-Vinylphosphonate
  modified_base 2: mod_base = OTHER; note = 2'-deoxy-2'-fluoroadenosine-3'-phosphorothioate
  modified_base 3: mod_base = OTHER; note = 2'-O-methylguanosine-3'-phosphate
  modified_base 4: mod_base = OTHER; note = 2'-O-methyladenosine-3'-phosphate
  modified_base 5: mod_base = OTHER; note = 2'-O-methyluridine-3'-phosphate
  modified_base 6: mod_base = OTHER; note = 2'-deoxy-2'-fluoroguanosine-3'-phosphate
  modified_base 7: mod_base = OTHER; note = 2'-O-methyluridine-3'-phosphate
  modified_base 8: mod_base = OTHER; note = 2'-deoxy-2'-fluorocytidine-3'-phosphate
  modified_base 9: mod_base = OTHER; note = 2'-deoxy-2'-fluorocytidine-3'-phosphate
  modified_base 10: mod_base = OTHER; note = 2'-O-methyladenosine-3'-phosphate
  modified_base 11: mod_base = OTHER; note = 2'-O-methyluridine-3'-phosphate
  modified_base 12: mod_base = OTHER; note = 2'-O-methylguanosine-3'-phosphate
  modified_base 13: mod_base = OTHER; note = 2'-O-methylguanosine-3'-phosphate
  modified_base 14: mod_base = OTHER; note = 2'-deoxy-2'-fluorouridine-3'-phosphate
  modified_base 15: mod_base = OTHER; note = 2'-O-methylguanosine-3'-phosphate
  modified_base 16: mod_base = OTHER; note = 2'-deoxy-2'-fluoroadenosine-3'-phosphate
  modified_base 17: mod_base = OTHER; note = 2'-O-methyladenosine-3'-phosphate
  modified_base 18: mod_base = OTHER; note = 2'-O-methylguanosine-3'-phosphate
  modified_base 19: mod_base = OTHER; note = 2'-O-methyladenosine-3'-phosphate
  modified_base 20: mod_base = OTHER; note = 2'-O-methylguanosine-3'-phosphate
  modified_base 21: mod_base = OTHER; note = 2'-O-methylcytidine-3'-phosphorothioate
  modified_base 22: mod_base = OTHER; note = 2'-O-methylguanosine-3'-phosphorothioate
  modified_base 23: mod_base = OTHER; note = 2'-O-methyluridine
tagatgtccatggtgaagagcgt

SEQ ID NO: 509 - RNA, 23 nt, synthetic construct
  source 1..23: mol_type = other RNA
  modified_base 1: mod_base = OTHER; note = 2'-O-methyluridine-3'-phosphorothioate 5'-(E)-Vinylphosphonate
  modified_base 2: mod_base = OTHER; note = 2'-deoxy-2'-fluoroadenosine-3'-phosphorothioate
  modified_base 3: mod_base = OTHER; note = 2'-O-methylguanosine-3'-phosphate
  modified_base 4: mod_base = OTHER; note = 2'-O-methylguanosine-3'-phosphate
  modified_base 5: mod_base = OTHER; note = 2'-O-methylcytidine-3'-phosphate
  modified_base 6: mod_base = OTHER; note = 2'-deoxy-2'-fluoroguanosine-3'-phosphate
  modified_base 7: mod_base = OTHER; note = 2'-O-methylcytidine-3'-phosphate
  modified_base 8: mod_base = OTHER; note = 2'-deoxy-2'-fluoroguanosine-3'-phosphate
  modified_base 9: mod_base = OTHER; note = 2'-deoxy-2'-fluorouridine-3'-phosphate
  modified_base 10: mod_base = OTHER; note = 2'-O-methylguanosine-3'-phosphate
  modified_base 11: mod_base = OTHER; note = 2'-O-methyluridine-3'-phosphate
  modified_base 12: mod_base = OTHER; note = 2'-O-methyladenosine-3'-phosphate
  modified_base 13: mod_base = OTHER; note = 2'-O-methylguanosine-3'-phosphate
  modified_base 14: mod_base = OTHER; note = 2'-deoxy-2'-fluoroadenosine-3'-phosphate
  modified_base 15: mod_base = OTHER; note = 2'-O-methyluridine-3'-phosphate
  modified_base 16: mod_base = OTHER; note = 2'-deoxy-2'-fluoroguanosine-3'-phosphate
  modified_base 17: mod_base = OTHER; note = 2'-O-methyluridine-3'-phosphate
  modified_base 18: mod_base = OTHER; note = 2'-O-methylcytidine-3'-phosphate
  modified_base 19: mod_base = OTHER; note = 2'-O-methylcytidine-3'-phosphate
  modified_base 20: mod_base = OTHER; note = 2'-O-methyladenosine-3'-phosphate
  modified_base 21: mod_base = OTHER; note = 2'-O-methyluridine-3'-phosphorothioate
  modified_base 22: mod_base = OTHER; note = 2'-O-methylguanosine-3'-phosphorothioate
  modified_base 23: mod_base = OTHER; note = 2'-O-methylguanosine
taggcgcgtgtagatgtccatgg

SEQ ID NO: 510 - RNA, 23 nt, synthetic construct
  source 1..23: mol_type = other RNA
  modified_base 1: mod_base = OTHER; note = 2'-O-methyluridine-3'-phosphorothioate 5'-(E)-Vinylphosphonate
  modified_base 2: mod_base = OTHER; note = 2'-deoxy-2'-fluorocytidine-3'-phosphorothioate
  modified_base 3: mod_base = OTHER; note = 2'-O-methylguanosine-3'-phosphate
  modified_base 4: mod_base = OTHER; note = 2'-O-methyladenosine-3'-phosphate
  modified_base 5: mod_base = OTHER; note = 2'-O-methyluridine-3'-phosphate
  modified_base 6: mod_base = OTHER; note = 2'-deoxy-2'-fluoroguanosine-3'-phosphate
  modified_base 7: mod_base = OTHER; note = 2'-O-methyladenosine-3'-phosphate
  modified_base 8: mod_base = OTHER; note = 2'-deoxy-2'-fluoroadenosine-3'-phosphate
  modified_base 9: mod_base = OTHER; note = 2'-deoxy-2'-fluorocytidine-3'-phosphate
  modified_base 10: mod_base = OTHER; note = 2'-O-methyladenosine-3'-phosphate
  modified_base 11: mod_base = OTHER; note = 2'-O-methylcytidine-3'-phosphate
  modified_base 12: mod_base = OTHER; note = 2'-O-methylcytidine-3'-phosphate
  modified_base 13: mod_base = OTHER; note = 2'-O-methyladenosine-3'-phosphate
  modified_base 14: mod_base = OTHER; note = 2'-deoxy-2'-fluorocytidine-3'-phosphate
  modified_base 15: mod_base = OTHER; note = 2'-O-methylcytidine-3'-phosphate
  modified_base 16: mod_base = OTHER; note = 2'-deoxy-2'-fluorocytidine-3'-phosphate
  modified_base 17: mod_base = OTHER; note = 2'-O-methyladenosine-3'-phosphate
  modified_base 18: mod_base = OTHER; note = 2'-O-methylguanosine-3'-phosphate
  modified_base 19: mod_base = OTHER; note = 2'-O-methyladenosine-3'-phosphate
  modified_base 20: mod_base = OTHER; note = 2'-O-methylguanosine-3'-phosphate
  modified_base 21: mod_base = OTHER; note = 2'-O-methylcytidine-3'-phosphorothioate
  modified_base 22: mod_base = OTHER; note = 2'-O-methylcytidine-3'-phosphorothioate
  modified_base 23: mod_base = OTHER; note = 2'-O-methylguanosine
tcgatgaacaccacccagagccg

SEQ ID NO: 511 - RNA, 23 nt, synthetic construct
  source 1..23: mol_type = other RNA
  modified_base 1: mod_base = OTHER; note = 2'-O-methyluridine-3'-phosphorothioate 5'-(E)-Vinylphosphonate
  modified_base 2: mod_base = OTHER; note = 2'-deoxy-2'-fluoroadenosine-3'-phosphorothioate
  modified_base 3: mod_base = OTHER; note = 2'-O-methylcytidine-3'-phosphate
  modified_base 4: mod_base = OTHER; note = 2'-O-methyladenosine-3'-phosphate
  modified_base 5: mod_base = OTHER; note = 2'-O-methylcytidine-3'-phosphate
  modified_base 6: mod_base = OTHER; note = 2'-deoxy-2'-fluorouridine-3'-phosphate
  modified_base 7: mod_base = OTHER; note = 2'-O-methyladenosine-3'-phosphate
  modified_base 8: mod_base = OTHER; note = 2'-deoxy-2'-fluorocytidine-3'-phosphate
  modified_base 9: mod_base = OTHER; note = 2'-deoxy-2'-fluorocytidine-3'-phosphate
  modified_base 10: mod_base = OTHER; note = 2'-O-methyladenosine-3'-phosphate
  modified_base 11: mod_base = OTHER; note = 2'-O-methylcytidine-3'-phosphate
  modified_base 12: mod_base = OTHER; note = 2'-O-methylguanosine-3'-phosphate
  modified_base 13: mod_base = OTHER; note = 2'-O-methyladenosine-3'-phosphate
  modified_base 14: mod_base = OTHER; note = 2'-deoxy-2'-fluorouridine-3'-phosphate
  modified_base 15: mod_base = OTHER; note = 2'-O-methylguanosine-3'-phosphate
  modified_base 16: mod_base = OTHER; note = 2'-deoxy-2'-fluoroadenosine-3'-phosphate
  modified_base 17: mod_base = OTHER; note = 2'-O-methyladenosine-3'-phosphate
  modified_base 18: mod_base = OTHER; note = 2'-O-methylcytidine-3'-phosphate
  modified_base 19: mod_base = OTHER; note = 2'-O-methyladenosine-3'-phosphate
  modified_base 20: mod_base = OTHER; note = 2'-O-methylcytidine-3'-phosphate
  modified_base 21: mod_base = OTHER; note = 2'-O-methylcytidine-3'-phosphorothioate
  modified_base 22: mod_base = OTHER; note = 2'-O-methyladenosine-3'-phosphorothioate
  modified_base 23: mod_base = OTHER; note = 2'-O-methylcytidine
tacactaccacgatgaacaccac

SEQ ID NO: 512 - RNA, 23 nt, synthetic construct
  source 1..23: mol_type = other RNA
  modified_base 1: mod_base = OTHER; note = 2'-O-methyluridine-3'-phosphorothioate 5'-(E)-Vinylphosphonate
  modified_base 2: mod_base = OTHER; note = 2'-deoxy-2'-fluoroadenosine-3'-phosphorothioate
  modified_base 3: mod_base = OTHER; note = 2'-O-methylguanosine-3'-phosphate
  modified_base 4: mod_base = OTHER; note = 2'-O-methylguanosine-3'-phosphate
  modified_base 5: mod_base = OTHER; note = 2'-O-methylcytidine-3'-phosphate
  modified_base 6: mod_base = OTHER; note = 2'-deoxy-2'-fluorocytidine-3'-phosphate
  modified_base 7: mod_base = OTHER; note = 2'-O-methyladenosine-3'-phosphate
  modified_base 8: mod_base = OTHER; note = 2'-deoxy-2'-fluorocytidine-3'-phosphate
  modified_base 9: mod_base = OTHER; note = 2'-deoxy-2'-fluorocytidine-3'-phosphate
  modified_base 10: mod_base = OTHER; note = 2'-O-methylguanosine-3'-phosphate
  modified_base 11: mod_base = OTHER; note = 2'-O-methyladenosine-3'-phosphate
  modified_base 12: mod_base = OTHER; note = 2'-O-methylcytidine-3'-phosphate
  modified_base 13: mod_base = OTHER; note = 2'-O-methyladenosine-3'-phosphate
  modified_base 14: mod_base = OTHER; note = 2'-deoxy-2'-fluorocytidine-3'-phosphate
  modified_base 15: mod_base = OTHER; note = 2'-O-methyluridine-3'-phosphate
  modified_base 16: mod_base = OTHER; note = 2'-deoxy-2'-fluoroadenosine-3'-phosphate
  modified_base 17: mod_base = OTHER; note = 2'-O-methylcytidine-3'-phosphate
  modified_base 18: mod_base = OTHER; note = 2'-O-methylcytidine-3'-phosphate
  modified_base 19: mod_base = OTHER; note = 2'-O-methyladenosine-3'-phosphate
  modified_base 20: mod_base = OTHER; note = 2'-O-methylcytidine-3'-phosphate
  modified_base 21: mod_base = OTHER; note = 2'-O-methylguanosine-3'-phosphorothioate
  modified_base 22: mod_base = OTHER; note = 2'-O-methyladenosine-3'-phosphorothioate
  modified_base 23: mod_base = OTHER; note = 2'-O-methyluridine
taggccaccgacactaccacgat

SEQ ID NO: 513 - RNA, 23 nt, synthetic construct
  source 1..23: mol_type = other RNA
  modified_base 1: mod_base = OTHER; note = 2'-O-methyluridine-3'-phosphorothioate 5'-(E)-Vinylphosphonate
  modified_base 2: mod_base = OTHER; note = 2'-deoxy-2'-fluorouridine-3'-phosphorothioate
  modified_base 3: mod_base = OTHER; note = 2'-O-methylguanosine-3'-phosphate
  modified_base 4: mod_base = OTHER; note = 2'-O-methylguanosine-3'-phosphate
  modified_base 5: mod_base = OTHER; note = 2'-O-methyladenosine-3'-phosphate
  modified_base 6: mod_base = OTHER; note = 2'-deoxy-2'-fluorouridine-3'-phosphate
  modified_base 7: mod_base = OTHER; note = 2'-O-methylguanosine-3'-phosphate
  modified_base 8: mod_base = OTHER; note = 2'-deoxy-2'-fluorouridine-3'-phosphate
  modified_base 9: mod_base = OTHER; note = 2'-deoxy-2'-fluoroadenosine-3'-phosphate
  modified_base 10: mod_base = OTHER; note = 2'-O-methyladenosine-3'-phosphate
  modified_base 11: mod_base = OTHER; note = 2'-O-methyluridine-3'-phosphate
  modified_base 12: mod_base = OTHER; note = 2'-O-methylcytidine-3'-phosphate
  modified_base 13: mod_base = OTHER; note = 2'-O-methylguanosine-3'-phosphate
  modified_base 14: mod_base = OTHER; note = 2'-deoxy-2'-fluoroadenosine-3'-phosphate
  modified_base 15: mod_base = OTHER; note = 2'-O-methyladenosine-3'-phosphate
  modified_base 16: mod_base = OTHER; note = 2'-deoxy-2'-fluoroguanosine-3'-phosphate
  modified_base 17: mod_base = OTHER; note = 2'-O-methyladenosine-3'-phosphate
  modified_base 18: mod_base = OTHER; note = 2'-O-methylguanosine-3'-phosphate
  modified_base 19: mod_base = OTHER; note = 2'-O-methylcytidine-3'-phosphate
  modified_base 20: mod_base = OTHER; note = 2'-O-methyluridine-3'-phosphate
  modified_base 21: mod_base = OTHER; note = 2'-O-methylguanosine-3'-phosphorothioate
  modified_base 22: mod_base = OTHER; note = 2'-O-methylcytidine-3'-phosphorothioate
  modified_base 23: mod_base = OTHER; note = 2'-O-methylcytidine
ttggatgtaatcgaagagctgcc

SEQ ID NO: 514 - RNA, 23 nt, synthetic construct
  source 1..23: mol_type = other RNA
  modified_base 1: mod_base = OTHER; note = 2'-O-methyluridine-3'-phosphorothioate 5'-(E)-Vinylphosphonate
  modified_base 2: mod_base = OTHER; note = 2'-deoxy-2'-fluoroadenosine-3'-phosphorothioate
  modified_base 3: mod_base = OTHER; note = 2'-O-methylguanosine-3'-phosphate
  modified_base 4: mod_base = OTHER; note = 2'-O-methyladenosine-3'-phosphate
  modified_base 5: mod_base = OTHER; note = 2'-O-methylguanosine-3'-phosphate
  modified_base 6: mod_base = OTHER; note = 2'-deoxy-2'-fluoroadenosine-3'-phosphate
  modified_base 7: mod_base = OTHER; note = 2'-O-methylcytidine-3'-phosphate
  modified_base 8: mod_base = OTHER; note = 2'-deoxy-2'-fluorouridine-3'-phosphate
  modified_base 9: mod_base = OTHER; note = 2'-deoxy-2'-fluoroguanosine-3'-phosphate
  modified_base 10: mod_base = OTHER; note = 2'-O-methylcytidine-3'-phosphate
  modified_base 11: mod_base = OTHER; note = 2'-O-methylcytidine-3'-phosphate
  modified_base 12: mod_base = OTHER; note = 2'-O-methyluridine-3'-phosphate
  modified_base 13: mod_base = OTHER; note = 2'-O-methylguanosine-3'-phosphate
  modified_base 14: mod_base = OTHER; note = 2'-deoxy-2'-fluoroguanosine-3'-phosphate
  modified_base 15: mod_base = OTHER; note = 2'-O-methyladenosine-3'-phosphate
  modified_base 16: mod_base = OTHER; note = 2'-deoxy-2'-fluorouridine-3'-phosphate
  modified_base 17: mod_base = OTHER; note = 2'-O-methylguanosine-3'-phosphate
  modified_base 18: mod_base = OTHER; note = 2'-O-methyluridine-3'-phosphate
  modified_base 19: mod_base = OTHER; note = 2'-O-methyladenosine-3'-phosphate
  modified_base 20: mod_base = OTHER; note = 2'-O-methyladenosine-3'-phosphate
  modified_base 21: mod_base = OTHER; note = 2'-O-methyluridine-3'-phosphorothioate
  modified_base 22: mod_base = OTHER; note = 2'-O-methylcytidine-3'-phosphorothioate
  modified_base 23: mod_base = OTHER; note = 2'-O-methylguanosine
tagagactgcctggatgtaatcg

SEQ ID NO: 515 - RNA, 23 nt, synthetic construct
  source 1..23: mol_type = other RNA
  modified_base 1: mod_base = OTHER; note = 2'-O-methyluridine-3'-phosphorothioate 5'-(E)-Vinylphosphonate
  modified_base 2: mod_base = OTHER; note = 2'-deoxy-2'-fluorocytidine-3'-phosphorothioate
  modified_base 3: mod_base = OTHER; note = 2'-O-methyladenosine-3'-phosphate
  modified_base 4: mod_base = OTHER; note = 2'-O-methylguanosine-3'-phosphate
  modified_base 5: mod_base = OTHER; note = 2'-O-methylguanosine-3'-phosphate
  modified_base 6: mod_base = OTHER; note = 2'-deoxy-2'-fluorouridine-3'-phosphate
  modified_base 7: mod_base = OTHER; note = 2'-O-methyladenosine-3'-phosphate
  modified_base 8: mod_base = OTHER; note = 2'-deoxy-2'-fluoroguanosine-3'-phosphate
  modified_base 9: mod_base = OTHER; note = 2'-deoxy-2'-fluorocytidine-3'-phosphate
  modified_base 10: mod_base = OTHER; note = 2'-O-methyluridine-3'-phosphate
  modified_base 11: mod_base = OTHER; note = 2'-O-methyladenosine-3'-phosphate
  modified_base 12: mod_base = OTHER; note = 2'-O-methylguanosine-3'-phosphate
  modified_base 13: mod_base = OTHER; note = 2'-O-methyladenosine-3'-phosphate
  modified_base 14: mod_base = OTHER; note = 2'-deoxy-2'-fluoroguanosine-3'-phosphate
  modified_base 15: mod_base = OTHER; note = 2'-O-methyladenosine-3'-phosphate
  modified_base 16: mod_base = OTHER; note = 2'-deoxy-2'-fluorocytidine-3'-phosphate
  modified_base 17: mod_base = OTHER; note = 2'-O-methyluridine-3'-phosphate
  modified_base 18: mod_base = OTHER; note = 2'-O-methylguanosine-3'-phosphate
  modified_base 19: mod_base = OTHER; note = 2'-O-methylcytidine-3'-phosphate
  modified_base 20: mod_base = OTHER; note = 2'-O-methylcytidine-3'-phosphate
  modified_base 21: mod_base = OTHER; note = 2'-O-methyluridine-3'-phosphorothioate
  modified_base 22: mod_base = OTHER; note = 2'-O-methylguanosine-3'-phosphorothioate
  modified_base 23: mod_base = OTHER; note = 2'-O-methylguanosine
tcaggtagctagagactgcctgg

SEQ ID NO: 516 - RNA, 23 nt, synthetic construct
  source 1..23: mol_type = other RNA
  modified_base 1: mod_base = OTHER; note = 2'-O-methyluridine-3'-phosphorothioate 5'-(E)-Vinylphosphonate
  modified_base 2: mod_base = OTHER; note = 2'-deoxy-2'-fluoroadenosine-3'-phosphorothioate
  modified_base 3: mod_base = OTHER; note = 2'-O-methylcytidine-3'-phosphate
  modified_base 4: mod_base = OTHER; note = 2'-O-methylguanosine-3'-phosphate
  modified_base 5: mod_base = OTHER; note = 2'-O-methyladenosine-3'-phosphate
  modified_base 6: mod_base = OTHER; note = 2'-deoxy-2'-fluoroadenosine-3'-phosphate
  modified_base 7: mod_base = OTHER; note = 2'-O-methylguanosine-3'-phosphate
  modified_base 8: mod_base = OTHER; note = 2'-deoxy-2'-fluoroadenosine-3'-phosphate
  modified_base 9: mod_base = OTHER; note = 2'-deoxy-2'-fluoroguanosine-3'-phosphate
  modified_base 10: mod_base = OTHER; note = 2'-O-methylcytidine-3'-phosphate
  modified_base 11: mod_base = OTHER; note = 2'-O-methylguanosine-3'-phosphate
  modified_base 12: mod_base = OTHER; note = 2'-O-methylcytidine-3'-phosphate
  modified_base 13: mod_base = OTHER; note = 2'-O-methylcytidine-3'-phosphate
  modified_base 14: mod_base = OTHER; note = 2'-deoxy-2'-fluoroadenosine-3'-phosphate
  modified_base 15: mod_base = OTHER; note = 2'-O-methylguanosine-3'-phosphate
  modified_base 16: mod_base = OTHER; note = 2'-deoxy-2'-fluorocytidine-3'-phosphate
  modified_base 17: mod_base = OTHER; note = 2'-O-methyladenosine-3'-phosphate
  modified_base 18: mod_base = OTHER; note = 2'-O-methylcytidine-3'-phosphate
  modified_base 19: mod_base = OTHER; note = 2'-O-methylguanosine-3'-phosphate
  modified_base 20: mod_base = OTHER; note = 2'-O-methyladenosine-3'-phosphate
  modified_base 21: mod_base = OTHER; note = 2'-O-methyladenosine-3'-phosphorothioate
  modified_base 22: mod_base = OTHER; note = 2'-O-methylguanosine-3'-phosphorothioate
  modified_base 23: mod_base = OTHER; note = 2'-O-methyladenosine
tacgaagagcgccagcacgaaga

SEQ ID NO: 517 - RNA, 23 nt, synthetic construct
  source 1..23: mol_type = other RNA
  modified_base 1: mod_base = OTHER; note = 2'-O-methyluridine-3'-phosphorothioate 5'-(E)-Vinylphosphonate
  modified_base 2: mod_base = OTHER; note = 2'-deoxy-2'-fluorocytidine-3'-phosphorothioate
  modified_base 3: mod_base = OTHER; note = 2'-O-methyluridine-3'-phosphate
  modified_base 4: mod_base = OTHER; note = 2'-O-methylguanosine-3'-phosphate
  modified_base 5: mod_base = OTHER; note = 2'-O-methylcytidine-3'-phosphate
  modified_base 6: mod_base = OTHER; note = 2'-deoxy-2'-fluorouridine-3'-phosphate
  modified_base 7: mod_base = OTHER; note = 2'-O-methylcytidine-3'-phosphate
  modified_base 8: mod_base = OTHER; note = 2'-deoxy-2'-fluoroadenosine-3'-phosphate
  modified_base 9: mod_base = OTHER; note = 2'-deoxy-2'-fluorouridine-3'-phosphate
  modified_base 10: mod_base = OTHER; note = 2'-O-methyluridine-3'-phosphate
  modified_base 11: mod_base = OTHER; note = 2'-O-methyladenosine-3'-phosphate
  modified_base 12: mod_base = OTHER; note = 2'-O-methyladenosine-3'-phosphate
  modified_base 13: mod_base = OTHER; note = 2'-O-methylcytidine-3'-phosphate
  modified_base 14: mod_base = OTHER; note = 2'-deoxy-2'-fluoroguanosine-3'-phosphate
  modified_base 15: mod_base = OTHER; note = 2'-O-methylcytidine-3'-phosphate
  modified_base 16: mod_base = OTHER; note = 2'-deoxy-2'-fluoroguanosine-3'-phosphate
  modified_base 17: mod_base = OTHER; note = 2'-O-methylcytidine-3'-phosphate
  modified_base 18: mod_base = OTHER; note = 2'-O-methylguanosine-3'-phosphate
  modified_base 19: mod_base = OTHER; note = 2'-O-methylguanosine-3'-phosphate
  modified_base 20: mod_base = OTHER; note = 2'-O-methylcytidine-3'-phosphate
  modified_base 21: mod_base = OTHER; note = 2'-O-methyladenosine-3'-phosphorothioate
  modified_base 22: mod_base = OTHER; note = 2'-O-methylcytidine-3'-phosphorothioate
  modified_base 23: mod_base = OTHER; note = 2'-O-methylguanosine
tctgctcattaacgcgcggcacg

SEQ ID NO: 518 - RNA, 23 nt, synthetic construct
  source 1..23: mol_type = other RNA
  modified_base 1: mod_base = OTHER; note = 2'-O-methyluridine-3'-phosphorothioate 5'-(E)-Vinylphosphonate
  modified_base 2: mod_base = OTHER; note = 2'-deoxy-2'-fluoroguanosine-3'-phosphorothioate
  modified_base 3: mod_base = OTHER; note = 2'-O-methyladenosine-3'-phosphate
  modified_base 4: mod_base = OTHER; note = 2'-O-methyladenosine-3'-phosphate
  modified_base 5: mod_base = OTHER; note = 2'-O-methyluridine-3'-phosphate
  modified_base 6: mod_base = OTHER; note = 2'-deoxy-2'-fluorocytidine-3'-phosphate
  modified_base 7: mod_base = OTHER; note = 2'-O-methyladenosine-3'-phosphate
  modified_base 8: mod_base = OTHER; note = 2'-deoxy-2'-fluoroguanosine-3'-phosphate
  modified_base 9: mod_base = OTHER; note = 2'-deoxy-2'-fluoroguanosine-3'-phosphate
  modified_base 10: mod_base = OTHER; note = 2'-O-methylcytidine-3'-phosphate
  modified_base 11: mod_base = OTHER; note = 2'-O-methylguanosine-3'-phosphate
  modified_base 12: mod_base = OTHER; note = 2'-O-methyluridine-3'-phosphate
  modified_base 13: mod_base = OTHER; note = 2'-O-methylguanosine-3'-phosphate
  modified_base 14: mod_base = OTHER; note = 2'-deoxy-2'-fluorocytidine-3'-phosphate
  modified_base 15: mod_base = OTHER; note = 2'-O-methylcytidine-3'-phosphate
  modified_base 16: mod_base = OTHER; note = 2'-deoxy-2'-fluoroadenosine-3'-phosphate
  modified_base 17: mod_base = OTHER; note = 2'-O-methylguanosine-3'-phosphate
  modified_base 18: mod_base = OTHER; note = 2'-O-methylguanosine-3'-phosphate
  modified_base 19: mod_base = OTHER; note = 2'-O-methylcytidine-3'-phosphate
  modified_base 20: mod_base = OTHER; note = 2'-O-methylcytidine-3'-phosphate
  modified_base 21: mod_base = OTHER; note = 2'-O-methylcytidine-3'-phosphorothioate
  modified_base 22: mod_base = OTHER; note = 2'-O-methyladenosine-3'-phosphorothioate
  modified_base 23: mod_base = OTHER; note = 2'-O-methyluridine
tgaatcaggcgtgccaggcccat

SEQ ID NO: 519 - RNA, 23 nt, synthetic construct
  source 1..23: mol_type = other RNA
  modified_base 1: mod_base = OTHER; note = 2'-O-methyluridine-3'-phosphorothioate 5'-(E)-Vinylphosphonate
  modified_base 2: mod_base = OTHER; note = 2'-deoxy-2'-fluoroguanosine-3'-phosphorothioate
  modified_base 3: mod_base = OTHER; note = 2'-O-methyladenosine-3'-phosphate
  modified_base 4: mod_base = OTHER; note = 2'-O-methylguanosine-3'-phosphate
  modified_base 5: mod_base = OTHER; note = 2'-O-methyladenosine-3'-phosphate
  modified_base 6: mod_base = OTHER; note = 2'-deoxy-2'-fluoroadenosine-3'-phosphate
  modified_base 7: mod_base = OTHER; note = 2'-O-methylcytidine-3'-phosphate
  modified_base 8: mod_base = OTHER; note = 2'-deoxy-2'-fluorouridine-3'-phosphate
  modified_base 9: mod_base = OTHER; note = 2'-deoxy-2'-fluorocytidine-3'-phosphate
  modified_base 10: mod_base = OTHER; note = 2'-O-methylguanosine-3'-phosphate
  modified_base 11: mod_base = OTHER; note = 2'-O-methylguanosine-3'-phosphate
  modified_base 12: mod_base = OTHER; note = 2'-O-methylguanosine-3'-phosphate
  modified_base 13: mod_base = OTHER; note = 2'-O-methyladenosine-3'-phosphate
  modified_base 14: mod_base = OTHER; note = 2'-deoxy-2'-fluoroadenosine-3'-phosphate
  modified_base 15: mod_base = OTHER; note = 2'-O-methyluridine-3'-phosphate
  modified_base 16: mod_base = OTHER; note = 2'-deoxy-2'-fluorocytidine-3'-phosphate
  modified_base 17: mod_base = OTHER; note = 2'-O-methyladenosine-3'-phosphate
  modified_base 18: mod_base = OTHER; note = 2'-O-methylguanosine-3'-phosphate
  modified_base 19: mod_base = OTHER; note = 2'-O-methylguanosine-3'-phosphate
  modified_base 20: mod_base = OTHER; note = 2'-O-methylcytidine-3'-phosphate
  modified_base 21: mod_base = OTHER; note = 2'-O-methylguanosine-3'-phosphorothioate
  modified_base 22: mod_base = OTHER; note = 2'-O-methyluridine-3'-phosphorothioate
  modified_base 23: mod_base = OTHER; note = 2'-O-methylguanosine
tgagaactcgggaatcaggcgtg

SEQ ID NO: 520 - RNA, 23 nt, synthetic construct
  source 1..23: mol_type = other RNA
  modified_base 1: mod_base = OTHER; note = 2'-O-methyluridine-3'-phosphorothioate 5'-(E)-Vinylphosphonate
  modified_base 2: mod_base = OTHER; note = 2'-deoxy-2'-fluoroguanosine-3'-phosphorothioate
  modified_base 3: mod_base = OTHER; note = 2'-O-methyladenosine-3'-phosphate
  modified_base 4: mod_base = OTHER; note = 2'-O-methylguanosine-3'-phosphate
  modified_base 5: mod_base = OTHER; note = 2'-O-methylcytidine-3'-phosphate
  modified_base 6: mod_base = OTHER; note = 2'-deoxy-2'-fluorocytidine-3'-phosphate
  modified_base 7: mod_base = OTHER; note = 2'-O-methylguanosine-3'-phosphate
  modified_base 8: mod_base = OTHER; note = 2'-deoxy-2'-fluoroadenosine-3'-phosphate
  modified_base 9: mod_base = OTHER; note = 2'-deoxy-2'-fluoroadenosine-3'-phosphate
  modified_base 10: mod_base = OTHER; note = 2'-O-methylguanosine-3'-phosphate
  modified_base 11: mod_base = OTHER; note = 2'-O-methylguanosine-3'-phosphate
  modified_base 12: mod_base = OTHER; note = 2'-O-methyladenosine-3'-phosphate
  modified_base 13: mod_base = OTHER; note = 2'-O-methylguanosine-3'-phosphate
  modified_base 14: mod_base = OTHER; note = 2'-deoxy-2'-fluoroadenosine-3'-phosphate
  modified_base 15: mod_base = OTHER; note = 2'-O-methyladenosine-3'-phosphate
  modified_base 16: mod_base = OTHER; note = 2'-deoxy-2'-fluorocytidine-3'-phosphate
  modified_base 17: mod_base = OTHER; note = 2'-O-methyluridine-3'-phosphate
  modified_base 18: mod_base = OTHER; note = 2'-O-methylcytidine-3'-phosphate
  modified_base 19: mod_base = OTHER; note = 2'-O-methylguanosine-3'-phosphate
  modified_base 20: mod_base = OTHER; note = 2'-O-methylguanosine-3'-phosphate
  modified_base 21: mod_base = OTHER; note = 2'-O-methylguanosine-3'-phosphorothioate
  modified_base 22: mod_base = OTHER; note = 2'-O-methyladenosine-3'-phosphorothioate
  modified_base 23: mod_base = OTHER; note = 2'-O-methyladenosine
tgagccgaaggagaactcgggaa

SEQ ID NO: 521 - RNA, 23 nt, synthetic construct
  source 1..23: mol_type = other RNA
  modified_base 1: mod_base = OTHER; note = 2'-O-methyluridine-3'-phosphorothioate 5'-(E)-Vinylphosphonate
  modified_base 2: mod_base = OTHER; note = 2'-deoxy-2'-fluoroadenosine-3'-phosphorothioate
  modified_base 3: mod_base = OTHER; note = 2'-O-methylguanosine-3'-phosphate
  modified_base 4: mod_base = OTHER; note = 2'-O-methyladenosine-3'-phosphate
  modified_base 5: mod_base = OTHER; note = 2'-O-methylguanosine-3'-phosphate
  modified_base 6: mod_base = OTHER; note = 2'-deoxy-2'-fluoroguanosine-3'-phosphate
  modified_base 7: mod_base = OTHER; note = 2'-O-methyladenosine-3'-phosphate
  modified_base 8: mod_base = OTHER; note = 2'-deoxy-2'-fluoroadenosine-3'-phosphate
  modified_base 9: mod_base = OTHER; note = 2'-deoxy-2'-fluoroadenosine-3'-phosphate
  modified_base 10: mod_base = OTHER; note = 2'-O-methylguanosine-3'-phosphate
  modified_base 11: mod_base = OTHER; note = 2'-O-methylcytidine-3'-phosphate
  modified_base 12: mod_base = OTHER; note = 2'-O-methyluridine-3'-phosphate
  modified_base 13: mod_base = OTHER; note = 2'-O-methylguanosine-3'-phosphate
  modified_base 14: mod_base = OTHER; note = 2'-deoxy-2'-fluoroguanosine-3'-phosphate
  modified_base 15: mod_base = OTHER; note = 2'-O-methylguanosine-3'-phosphate
  modified_base 16: mod_base = OTHER; note = 2'-deoxy-2'-fluorocytidine-3'-phosphate
  modified_base 17: mod_base = OTHER; note = 2'-O-methyladenosine-3'-phosphate
  modified_base 18: mod_base = OTHER; note = 2'-O-methylcytidine-3'-phosphate
  modified_base 19: mod_base = OTHER; note = 2'-O-methylguanosine-3'-phosphate
  modified_base 20: mod_base = OTHER; note = 2'-O-methylcytidine-3'-phosphate
  modified_base 21: mod_base = OTHER; note = 2'-O-methylcytidine-3'-phosphorothioate
  modified_base 22: mod_base = OTHER; note = 2'-O-methylguanosine-3'-phosphorothioate
  modified_base 23: mod_base = OTHER; note = 2'-O-methyladenosine
tagaggaaagctgggcacgccga

SEQ ID NO: 522 - RNA, 23 nt, synthetic construct
  source 1..23: mol_type = other RNA
  modified_base 1: mod_base = OTHER; note = 2'-O-methyluridine-3'-phosphorothioate 5'-(E)-Vinylphosphonate
  modified_base 2: mod_base = OTHER; note = 2'-deoxy-2'-fluoroadenosine-3'-phosphorothioate
  modified_base 3: mod_base = OTHER; note = 2'-O-methylguanosine-3'-phosphate
  modified_base 4: mod_base = OTHER; note = 2'-O-methyluridine-3'-phosphate
  modified_base 5: mod_base = OTHER; note = 2'-O-methylguanosine-3'-phosphate
  modified_base 6: mod_base = OTHER; note = 2'-deoxy-2'-fluorocytidine-3'-phosphate
  modified_base 7: mod_base = OTHER; note = 2'-O-methyladenosine-3'-phosphate
  modified_base 8: mod_base = OTHER; note = 2'-deoxy-2'-fluorocytidine-3'-phosphate
  modified_base 9: mod_base = OTHER; note = 2'-deoxy-2'-fluoroguanosine-3'-phosphate
  modified_base 10: mod_base = OTHER; note = 2'-O-methylcytidine-3'-phosphate
  modified_base 11: mod_base = OTHER; note = 2'-O-methylcytidine-3'-phosphate
  modified_base 12: mod_base = OTHER; note = 2'-O-methylguanosine-3'-phosphate
  modified_base 13: mod_base = OTHER; note = 2'-O-methylcytidine-3'-phosphate
  modified_base 14: mod_base = OTHER; note = 2'-deoxy-2'-fluoroadenosine-3'-phosphate
  modified_base 15: mod_base = OTHER; note = 2'-O-methylguanosine-3'-phosphate
  modified_base 16: mod_base = OTHER; note = 2'-deoxy-2'-fluoroadenosine-3'-phosphate
  modified_base 17: mod_base = OTHER; note = 2'-O-methylguanosine-3'-phosphate
  modified_base 18: mod_base = OTHER; note = 2'-O-methylguanosine-3'-phosphate
  modified_base 19: mod_base = OTHER; note = 2'-O-methyladenosine-3'-phosphate
  modified_base 20: mod_base = OTHER; note = 2'-O-methyladenosine-3'-phosphate
  modified_base 21: mod_base = OTHER; note = 2'-O-methyladenosine-3'-phosphorothioate
  modified_base 22: mod_base = OTHER; note = 2'-O-methylguanosine-3'-phosphorothioate
  modified_base 23: mod_base = OTHER; note = 2'-O-methylcytidine
tagtgcacgccgcagaggaaagc

SEQ ID NO: 523 - RNA, 23 nt, synthetic construct
  source 1..23: mol_type = other RNA
  modified_base 1: mod_base = OTHER; note = 2'-O-methyluridine-3'-phosphorothioate 5'-(E)-Vinylphosphonate
  modified_base 2: mod_base = OTHER; note = 2'-deoxy-2'-fluoroadenosine-3'-phosphorothioate
  modified_base 3: mod_base = OTHER; note = 2'-O-methylguanosine-3'-phosphate
  modified_base 4: mod_base = OTHER; note = 2'-O-methyluridine-3'-phosphate
  modified_base 5: mod_base = OTHER; note = 2'-O-methyladenosine-3'-phosphate
  modified_base 6: mod_base = OTHER; note = 2'-deoxy-2'-fluoroguanosine-3'-phosphate
  modified_base 7: mod_base = OTHER; note = 2'-O-methyladenosine-3'-phosphate
  modified_base 8: mod_base = OTHER; note = 2'-deoxy-2'-fluoroguanosine-3'-phosphate
  modified_base 9: mod_base = OTHER; note = 2'-deoxy-2'-fluoroguanosine-3'-phosphate
  modified_base 10: mod_base = OTHER; note = 2'-O-methyluridine-3'-phosphate
  modified_base 11: mod_base = OTHER; note = 2'-O-methyladenosine-3'-phosphate
  modified_base 12: mod_base = OTHER; note = 2'-O-methylguanosine-3'-phosphate
  modified_base 13: mod_base = OTHER; note = 2'-O-methyluridine-3'-phosphate
  modified_base 14: mod_base = OTHER; note = 2'-deoxy-2'-fluoroguanosine-3'-phosphate
  modified_base 15: mod_base = OTHER; note = 2'-O-methylcytidine-3'-phosphate
  modified_base 16: mod_base = OTHER; note = 2'-deoxy-2'-fluoroadenosine-3'-phosphate
  modified_base 17: mod_base = OTHER; note = 2'-O-methylcytidine-3'-phosphate
  modified_base 18: mod_base = OTHER; note = 2'-O-methylguanosine-3'-phosphate
  modified_base 19: mod_base = OTHER; note = 2'-O-methylcytidine-3'-phosphate
  modified_base 20: mod_base = OTHER; note = 2'-O-methylcytidine-3'-phosphate
  modified_base 21: mod_base = OTHER; note = 2'-O-methylguanosine-3'-phosphorothioate
  modified_base 22: mod_base = OTHER; note = 2'-O-methylcytidine-3'-phosphorothioate
  modified_base 23: mod_base = OTHER; note = 2'-O-methyladenosine
tagtagaggtagtgcacgccgca

SEQ ID NO: 524 - RNA, 23 nt, synthetic construct
  source 1..23: mol_type = other RNA
  modified_base 1: mod_base = OTHER; note = 2'-O-methyluridine-3'-phosphorothioate 5'-(E)-Vinylphosphonate
  modified_base 2: mod_base = OTHER; note = 2'-deoxy-2'-fluorocytidine-3'-phosphorothioate
  modified_base 3: mod_base = OTHER; note = 2'-O-methyladenosine-3'-phosphate
  modified_base 4: mod_base = OTHER; note = 2'-O-methyladenosine-3'-phosphate
  modified_base 5: mod_base = OTHER; note = 2'-O-methyluridine-3'-phosphate
  modified_base 6: mod_base = OTHER; note = 2'-deoxy-2'-fluoroguanosine-3'-phosphate
  modified_base 7: mod_base = OTHER; note = 2'-O-methylguanosine-3'-phosphate
  modified_base 8: mod_base = OTHER; note = 2'-deoxy-2'-fluorocytidine-3'-phosphate
  modified_base 9: mod_base = OTHER; note = 2'-deoxy-2'-fluoroguanosine-3'-phosphate
  modified_base 10: mod_base = OTHER; note = 2'-O-methyladenosine-3'-phosphate
  modified_base 11: mod_base = OTHER; note = 2'-O-methyladenosine-3'-phosphate
  modified_base 12: mod_base = OTHER; note = 2'-O-methylguanosine-3'-phosphate
  modified_base 13: mod_base = OTHER; note = 2'-O-methyluridine-3'-phosphate
  modified_base 14: mod_base = OTHER; note = 2'-deoxy-2'-fluoroadenosine-3'-phosphate
  modified_base 15: mod_base = OTHER; note = 2'-O-methylguanosine-3'-phosphate
  modified_base 16: mod_base = OTHER; note = 2'-deoxy-2'-fluoroadenosine-3'-phosphate
  modified_base 17: mod_base = OTHER; note = 2'-O-methylguanosine-3'-phosphate
  modified_base 18: mod_base = OTHER; note = 2'-O-methylguanosine-3'-phosphate
  modified_base 19: mod_base = OTHER; note = 2'-O-methyluridine-3'-phosphate
  modified_base 20: mod_base = OTHER; note = 2'-O-methyladenosine-3'-phosphate
  modified_base 21: mod_base = OTHER; note = 2'-O-methylguanosine-3'-phosphorothioate
  modified_base 22: mod_base = OTHER; note = 2'-O-methyluridine-3'-phosphorothioate
  modified_base 23: mod_base = OTHER; note = 2'-O-methylguanosine
tcaatggcgaagtagaggtagtg

SEQ ID NO: 525 - RNA, 23 nt, synthetic construct
  source 1..23: mol_type = other RNA
  modified_base 1: mod_base = OTHER; note = 2'-O-methyluridine-3'-phosphorothioate 5'-(E)-Vinylphosphonate
  modified_base 2: mod_base = OTHER; note = 2'-deoxy-2'-fluorocytidine-3'-phosphorothioate
  modified_base 3: mod_base = OTHER; note = 2'-O-methyladenosine-3'-phosphate
  modified_base 4: mod_base = OTHER; note = 2'-O-methylguanosine-3'-phosphate
  modified_base 5: mod_base = OTHER; note = 2'-O-methyladenosine-3'-phosphate
  modified_base 6: mod_base = OTHER; note = 2'-deoxy-2'-fluoroadenosine-3'-phosphate
  modified_base 7: mod_base = OTHER; note = 2'-O-methylguanosine-3'-phosphate
  modified_base 8: mod_base = OTHER; note = 2'-deoxy-2'-fluoroadenosine-3'-phosphate
  modified_base 9: mod_base = OTHER; note = 2'-deoxy-2'-fluoroadenosine-3'-phosphate
  modified_base 10: mod_base = OTHER; note = 2'-O-methylcytidine-3'-phosphate
  modified_base 11: mod_base = OTHER; note = 2'-O-methyladenosine-3'-phosphate
  modified_base 12: mod_base = OTHER; note = 2'-O-methylguanosine-3'-phosphate
  modified_base 13: mod_base = OTHER; note = 2'-O-methylcytidine-3'-phosphate
  modified_base 14: mod_base = OTHER; note = 2'-deoxy-2'-fluoroadenosine-3'-phosphate
  modified_base 15: mod_base = OTHER; note = 2'-O-methylcytidine-3'-phosphate
  modified_base 16: mod_base = OTHER; note = 2'-deoxy-2'-fluoroadenosine-3'-phosphate
  modified_base 17: mod_base = OTHER; note = 2'-O-methyladenosine-3'-phosphate
  modified_base 18: mod_base = OTHER; note = 2'-O-methyluridine-3'-phosphate
  modified_base 19: mod_base = OTHER; note = 2'-O-methylguanosine-3'-phosphate
  modified_base 20: mod_base = OTHER; note = 2'-O-methylguanosine-3'-phosphate
  modified_base 21: mod_base = OTHER; note = 2'-O-methylcytidine-3'-phosphorothioate
  modified_base 22: mod_base = OTHER; note = 2'-O-methylguanosine-3'-phosphorothioate
  modified_base 23: mod_base = OTHER; note = 2'-O-methyladenosine
tcagaagaacagcacaatggcga

SEQ ID NO: 526 - RNA, 23 nt, synthetic construct
  source 1..23: mol_type = other RNA
  modified_base 1: mod_base = OTHER; note = 2'-O-methyluridine-3'-phosphorothioate 5'-(E)-Vinylphosphonate
  modified_base 2: mod_base = OTHER; note = 2'-deoxy-2'-fluoroadenosine-3'-phosphorothioate
  modified_base 3: mod_base = OTHER; note = 2'-O-methylguanosine-3'-phosphate
  modified_base 4: mod_base = OTHER; note = 2'-O-methylguanosine-3'-phosphate
  modified_base 5: mod_base = OTHER; note = 2'-O-methylcytidine-3'-phosphate
  modified_base 6: mod_base = OTHER; note = 2'-deoxy-2'-fluorocytidine-3'-phosphate
  modified_base 7: mod_base = OTHER; note = 2'-O-methyladenosine-3'-phosphate
  modified_base 8: mod_base = OTHER; note = 2'-deoxy-2'-fluoroguanosine-3'-phosphate
  modified_base 9: mod_base = OTHER; note = 2'-deoxy-2'-fluoroadenosine-3'-phosphate
  modified_base 10: mod_base = OTHER; note = 2'-O-methylguanosine-3'-phosphate
  modified_base 11: mod_base = OTHER; note = 2'-O-methylcytidine-3'-phosphate
  modified_base 12: mod_base = OTHER; note = 2'-O-methyladenosine-3'-phosphate
  modified_base 13: mod_base = OTHER; note = 2'-O-methylguanosine-3'-phosphate
  modified_base 14: mod_base = OTHER; note = 2'-deoxy-2'-fluoroadenosine-3'-phosphate
  modified_base 15: mod_base = OTHER; note = 2'-O-methyladenosine-3'-phosphate
  modified_base 16: mod_base = OTHER; note = 2'-deoxy-2'-fluoroguanosine-3'-phosphate
  modified_base 17: mod_base = OTHER; note = 2'-O-methyladenosine-3'-phosphate
  modified_base 18: mod_base = OTHER; note = 2'-O-methyladenosine-3'-phosphate
  modified_base 19: mod_base = OTHER; note = 2'-O-methylcytidine-3'-phosphate
  modified_base 20: mod_base = OTHER; note = 2'-O-methyladenosine-3'-phosphate
  modified_base 21: mod_base = OTHER; note = 2'-O-methylguanosine-3'-phosphorothioate
  modified_base 22: mod_base = OTHER; note = 2'-O-methylcytidine-3'-phosphorothioate
  modified_base 23: mod_base = OTHER; note = 2'-O-methyladenosine
taggccagagcagaagaacagca

SEQ ID NO: 527 - RNA, 23 nt, synthetic construct
  source 1..23: mol_type = other RNA
  modified_base 1: mod_base = OTHER; note = 2'-O-methyluridine-3'-phosphorothioate 5'-(E)-Vinylphosphonate
  modified_base 2: mod_base = OTHER; note = 2'-deoxy-2'-fluorouridine-3'-phosphorothioate
  modified_base 3: mod_base = OTHER; note = 2'-O-methylguanosine-3'-phosphate
  modified_base 4: mod_base = OTHER; note = 2'-O-methyladenosine-3'-phosphate
  modified_base 5: mod_base = OTHER; note = 2'-O-methylguanosine-3'-phosphate
  modified_base 6: mod_base = OTHER; note = 2'-deoxy-2'-fluoroguanosine-3'-phosphate
  modified_base 7: mod_base = OTHER; note = 2'-O-methylguanosine-3'-phosphate
  modified_base 8: mod_base = OTHER; note = 2'-deoxy-2'-fluorouridine-3'-phosphate
  modified_base 9: mod_base = OTHER; note = 2'-deoxy-2'-fluoroguanosine-3'-phosphate
  modified_base 10: mod_base = OTHER; note = 2'-O-methyladenosine-3'-phosphate
  modified_base 11: mod_base = OTHER; note = 2'-O-methylguanosine-3'-phosphate
  modified_base 12: mod_base = OTHER; note = 2'-O-methylguanosine-3'-phosphate
  modified_base 13: mod_base = OTHER; note = 2'-O-methyladenosine-3'-phosphate
  modified_base 14: mod_base = OTHER; note = 2'-deoxy-2'-fluoroguanosine-3'-phosphate
  modified_base 15: mod_base = OTHER; note = 2'-O-methylguanosine-3'-phosphate
  modified_base 16: mod_base = OTHER; note = 2'-deoxy-2'-fluorocytidine-3'-phosphate
  modified_base 17: mod_base = OTHER; note = 2'-O-methylcytidine-3'-phosphate
  modified_base 18: mod_base = OTHER; note = 2'-O-methyladenosine-3'-phosphate
  modified_base 19: mod_base = OTHER; note = 2'-O-methylguanosine-3'-phosphate
  modified_base 20: mod_base = OTHER; note = 2'-O-methyladenosine-3'-phosphate
  modified_base 21: mod_base = OTHER; note = 2'-O-methylguanosine-3'-phosphorothioate
  modified_base 22: mod_base = OTHER; note = 2'-O-methylcytidine-3'-phosphorothioate
  modified_base 23: mod_base = OTHER; note = 2'-O-methyladenosine
ttgagggtgaggaggccagagca

SEQ ID NO: 528 - RNA, 23 nt, synthetic construct
  source 1..23: mol_type = other RNA
  modified_base 1: mod_base = OTHER; note = 2'-O-methyluridine-3'-phosphorothioate 5'-(E)-Vinylphosphonate
  modified_base 2: mod_base = OTHER; note = 2'-deoxy-2'-fluoroadenosine-3'-phosphorothioate
  modified_base 3: mod_base = OTHER; note = 2'-O-methylguanosine-3'-phosphate
  modified_base 4: mod_base = OTHER; note = 2'-O-methylguanosine-3'-phosphate
  modified_base 5: mod_base = OTHER; note = 2'-O-methylguanosine-3'-phosphate
  modified_base 6: mod_base = OTHER; note = 2'-deoxy-2'-fluoroadenosine-3'-phosphate
  modified_base 7: mod_base = OTHER; note = 2'-O-methylguanosine-3'-phosphate
  modified_base 8: mod_base = OTHER; note = 2'-deoxy-2'-fluoroadenosine-3'-phosphate
  modified_base 9: mod_base = OTHER; note = 2'-deoxy-2'-fluorocytidine-3'-phosphate
  modified_base 10: mod_base = OTHER; note = 2'-O-methylcytidine-3'-phosphate
  modified_base 11: mod_base = OTHER; note = 2'-O-methylguanosine-3'-phosphate
  modified_base 12: mod_base = OTHER; note = 2'-O-methyluridine-3'-phosphate
  modified_base 13: mod_base = OTHER; note = 2'-O-methylguanosine-3'-phosphate
  modified_base 14: mod_base = OTHER; note = 2'-deoxy-2'-fluoroadenosine-3'-phosphate
  modified_base 15: mod_base = OTHER; note = 2'-O-methylguanosine-3'-phosphate
  modified_base 16: mod_base = OTHER; note = 2'-deoxy-2'-fluoroguanosine-3'-phosphate
  modified_base 17: mod_base = OTHER; note = 2'-O-methylguanosine-3'-phosphate
  modified_base 18: mod_base = OTHER; note = 2'-O-methyluridine-3'-phosphate
  modified_base 19: mod_base = OTHER; note = 2'-O-methylguanosine-3'-phosphate
  modified_base 20: mod_base = OTHER; note = 2'-O-methyladenosine-3'-phosphate
  modified_base 21: mod_base = OTHER; note = 2'-O-methylguanosine-3'-phosphorothioate
  modified_base 22: mod_base = OTHER; note = 2'-O-methylguanosine-3'-phosphorothioate
  modified_base 23: mod_base = OTHER; note = 2'-O-methyladenosine
tagggagaccgtgagggtgagga

SEQ ID NO: 529 - RNA, 23 nt, synthetic construct
  source 1..23: mol_type = other RNA
  modified_base 1: mod_base = OTHER; note = 2'-O-methyluridine-3'-phosphorothioate 5'-(E)-Vinylphosphonate
  modified_base 2: mod_base = OTHER; note = 2'-deoxy-2'-fluoroadenosine-3'-phosphorothioate
  modified_base 3: mod_base = OTHER; note = 2'-O-methyladenosine-3'-phosphate
  modified_base 4: mod_base = OTHER; note = 2'-O-methylguanosine-3'-phosphate
  modified_base 5: mod_base = OTHER; note = 2'-O-methyladenosine-3'-phosphate
  modified_base 6: mod_base = OTHER; note = 2'-deoxy-2'-fluorocytidine-3'-phosphate
  modified_base 7: mod_base = OTHER; note = 2'-O-methylcytidine-3'-phosphate
  modified_base 8: mod_base = OTHER; note = 2'-deoxy-2'-fluoroadenosine-3'-phosphate
  modified_base 9: mod_base = OTHER; note = 2'-deoxy-2'-fluoroguanosine-3'-phosphate
  modified_base 10: mod_base = OTHER; note = 2'-O-methylguanosine-3'-phosphate
  modified_base 11: mod_base = OTHER; note = 2'-O-methylcytidine-3'-phosphate
  modified_base 12: mod_base = OTHER; note = 2'-O-methylguanosine-3'-phosphate
  modified_base 13: mod_base = OTHER; note = 2'-O-methylguanosine-3'-phosphate
  modified_base 14: mod_base = OTHER; note = 2'-deoxy-2'-fluorouridine-3'-phosphate
  modified_base 15: mod_base = OTHER; note = 2'-O-methylguanosine-3'-phosphate
  modified_base 16: mod_base = OTHER; note = 2'-deoxy-2'-fluoroguanosine-3'-phosphate
  modified_base 17: mod_base = OTHER; note = 2'-O-methyladenosine-3'-phosphate
  modified_base 18: mod_base = OTHER; note = 2'-O-methylguanosine-3'-phosphate
  modified_base 19: mod_base = OTHER; note = 2'-O-methylguanosine-3'-phosphate
  modified_base 20: mod_base = OTHER; note = 2'-O-methyluridine-3'-phosphate
  modified_base 21: mod_base = OTHER; note = 2'-O-methylguanosine-3'-phosphorothioate
  modified_base 22: mod_base = OTHER; note = 2'-O-methylcytidine-3'-phosphorothioate
  modified_base 23: mod_base = OTHER; note = 2'-O-methyluridine
taagaccaggcggtggaggtgct

SEQ ID NO: 530 - RNA, 23 nt, synthetic construct
  source 1..23: mol_type = other RNA
  modified_base 1: mod_base = OTHER; note = 2'-O-methyluridine-3'-phosphorothioate 5'-(E)-Vinylphosphonate
  modified_base 2: mod_base = OTHER; note = 2'-deoxy-2'-fluorocytidine-3'-phosphorothioate
  modified_base 3: mod_base = OTHER; note = 2'-O-methylguanosine-3'-phosphate
  modified_base 4: mod_base = OTHER; note = 2'-O-methylguanosine-3'-phosphate
  modified_base 5: mod_base = OTHER; note = 2'-O-methyladenosine-3'-phosphate
  modified_base 6: mod_base = OTHER; note = 2'-deoxy-2'-fluoroguanosine-3'-phosphate
  modified_base 7: mod_base = OTHER; note = 2'-O-methyladenosine-3'-phosphate
  modified_base 8: mod_base = OTHER; note = 2'-deoxy-2'-fluorocytidine-3'-phosphate
  modified_base 9: mod_base = OTHER; note = 2'-deoxy-2'-fluorouridine-3'-phosphate
  modified_base 10: mod_base = OTHER; note = 2'-O-methylguanosine-3'-phosphate
  modified_base 11: mod_base = OTHER; note = 2'-O-methyladenosine-3'-phosphate
  modified_base 12: mod_base = OTHER; note = 2'-O-methyladenosine-3'-phosphate
  modified_base 13: mod_base = OTHER; note = 2'-O-methylguanosine-3'-phosphate
  modified_base 14: mod_base = OTHER; note = 2'-deoxy-2'-fluoroadenosine-3'-phosphate
  modified_base 15: mod_base = OTHER; note = 2'-O-methylcytidine-3'-phosphate
  modified_base 16: mod_base = OTHER; note = 2'-deoxy-2'-fluorocytidine-3'-phosphate
  modified_base 17: mod_base = OTHER; note = 2'-O-methyladenosine-3'-phosphate
  modified_base 18: mod_base = OTHER; note = 2'-O-methylguanosine-3'-phosphate
  modified_base 19: mod_base = OTHER; note = 2'-O-methylguanosine-3'-phosphate
  modified_base 20: mod_base = OTHER; note = 2'-O-methylcytidine-3'-phosphate
  modified_base 21: mod_base = OTHER; note = 2'-O-methylguanosine-3'-phosphorothioate
  modified_base 22: mod_base = OTHER; note = 2'-O-methylguanosine-3'-phosphorothioate
  modified_base 23: mod_base = OTHER; note = 2'-O-methyluridine
tcggagactgaagaccaggcggt

SEQ ID NO: 531 - RNA, 23 nt, synthetic construct
  source 1..23: mol_type = other RNA
  modified_base 1: mod_base = OTHER; note = 2'-O-methyluridine-3'-phosphorothioate 5'-(E)-Vinylphosphonate
  modified_base 2: mod_base = OTHER; note = 2'-deoxy-2'-fluorouridine-3'-phosphorothioate
  modified_base 3: mod_base = OTHER; note = 2'-O-methyluridine-3'-phosphate
  modified_base 4: mod_base = OTHER; note = 2'-O-methylcytidine-3'-phosphate
  modified_base 5: mod_base = OTHER; note = 2'-O-methylcytidine-3'-phosphate
  modified_base 6: mod_base = OTHER; note = 2'-deoxy-2'-fluorouridine-3'-phosphate
  modified_base 7: mod_base = OTHER; note = 2'-O-methylcytidine-3'-phosphate
  modified_base 8: mod_base = OTHER; note = 2'-deoxy-2'-fluorocytidine-3'-phosphate
  modified_base 9: mod_base = OTHER; note = 2'-deoxy-2'-fluorouridine-3'-phosphate
  modified_base 10: mod_base = OTHER; note = 2'-O-methyluridine-3'-phosphate
  modified_base 11: mod_base = OTHER; note = 2'-O-methylguanosine-3'-phosphate
  modified_base 12: mod_base = OTHER; note = 2'-O-methylcytidine-3'-phosphate
  modified_base 13: mod_base = OTHER; note = 2'-O-methyluridine-3'-phosphate
  modified_base 14: mod_base = OTHER; note = 2'-deoxy-2'-fluoroadenosine-3'-phosphate
  modified_base 15: mod_base = OTHER; note = 2'-O-methyluridine-3'-phosphate
  modified_base 16: mod_base = OTHER; note = 2'-deoxy-2'-fluoroguanosine-3'-phosphate
  modified_base 17: mod_base = OTHER; note = 2'-O-methylcytidine-3'-phosphate
  modified_base 18: mod_base = OTHER; note = 2'-O-methylcytidine-3'-phosphate
  modified_base 19: mod_base = OTHER; note = 2'-O-methylguanosine-3'-phosphate
  modified_base 20: mod_base = OTHER; note = 2'-O-methylguanosine-3'-phosphate
  modified_base 21: mod_base = OTHER; note = 2'-O-methyladenosine-3'-phosphorothioate
  modified_base 22: mod_base = OTHER; note = 2'-O-methylguanosine-3'-phosphorothioate
  modified_base 23: mod_base = OTHER; note = 2'-O-methyladenosine
tttcctccttgctatgccggaga

SEQ ID NO: 532 - RNA, 23 nt, synthetic construct
  source 1..23: mol_type = other RNA
  modified_base 1: mod_base = OTHER; note = 2'-O-methyluridine-3'-phosphorothioate 5'-(E)-Vinylphosphonate
  modified_base 2: mod_base = OTHER; note = 2'-deoxy-2'-fluoroadenosine-3'-phosphorothioate
  modified_base 3: mod_base = OTHER; note = 2'-O-methylguanosine-3'-phosphate
  modified_base 4: mod_base = OTHER; note = 2'-O-methylguanosine-3'-phosphate
  modified_base 5: mod_base = OTHER; note = 2'-O-methyluridine-3'-phosphate
  modified_base 6: mod_base = OTHER; note = 2'-deoxy-2'-fluorocytidine-3'-phosphate
  modified_base 7: mod_base = OTHER; note = 2'-O-methylcytidine-3'-phosphate
  modified_base 8: mod_base = OTHER; note = 2'-deoxy-2'-fluorouridine-3'-phosphate
  modified_base 9: mod_base = OTHER; note = 2'-deoxy-2'-fluorocytidine-3'-phosphate
  modified_base 10: mod_base = OTHER; note = 2'-O-methylcytidine-3'-phosphate
  modified_base 11: mod_base = OTHER; note = 2'-O-methylcytidine-3'-phosphate
  modified_base 12: mod_base = OTHER; note = 2'-O-methylguanosine-3'-phosphate
  modified_base 13: mod_base = OTHER; note = 2'-O-methyluridine-3'-phosphate
  modified_base 14: mod_base = OTHER; note = 2'-deoxy-2'-fluorouridine-3'-phosphate
  modified_base 15: mod_base = OTHER; note = 2'-O-methylcytidine-3'-phosphate
  modified_base 16: mod_base = OTHER; note = 2'-deoxy-2'-fluorocytidine-3'-phosphate
  modified_base 17: mod_base = OTHER; note = 2'-O-methyluridine-3'-phosphate
  modified_base 18: mod_base = OTHER; note = 2'-O-methylcytidine-3'-phosphate
  modified_base 19: mod_base = OTHER; note = 2'-O-methylcytidine-3'-phosphate
  modified_base 20: mod_base = OTHER; note = 2'-O-methyluridine-3'-phosphate
  modified_base 21: mod_base = OTHER; note = 2'-O-methyluridine-3'-phosphorothioate
  modified_base 22: mod_base = OTHER; note = 2'-O-methylguanosine-3'-phosphorothioate
  modified_base 23: mod_base = OTHER; note = 2'-O-methylcytidine
taggtcctcccgttcctccttgc

SEQ ID NO: 533 - RNA, 23 nt, synthetic construct
  source 1..23: mol_type = other RNA
  modified_base 1: mod_base = OTHER; note = 2'-O-methyluridine-3'-phosphorothioate 5'-(E)-Vinylphosphonate
  modified_base 2: mod_base = OTHER; note = 2'-deoxy-2'-fluorouridine-3'-phosphorothioate
  modified_base 3: mod_base = OTHER; note = 2'-O-methylcytidine-3'-phosphate
  modified_base 4: mod_base = OTHER; note = 2'-O-methyladenosine-3'-phosphate
  modified_base 5: mod_base = OTHER; note = 2'-O-methylguanosine-3'-phosphate
  modified_base 6: mod_base = OTHER; note = 2'-deoxy-2'-fluorocytidine-3'-phosphate
  modified_base 7: mod_base = OTHER; note = 2'-O-methyladenosine-3'-phosphate
  modified_base 8: mod_base = OTHER; note = 2'-deoxy-2'-fluorouridine-3'-phosphate
  modified_base 9: mod_base = OTHER; note = 2'-deoxy-2'-fluorocytidine-3'-phosphate
  modified_base 10: mod_base = OTHER; note = 2'-O-methylcytidine-3'-phosphate
  modified_base 11: mod_base = OTHER; note = 2'-O-methyladenosine-3'-phosphate
  modified_base 12: mod_base = OTHER; note = 2'-O-methylguanosine-3'-phosphate
  modified_base 13: mod_base = OTHER; note = 2'-O-methylguanosine-3'-phosphate
  modified_base 14: mod_base = OTHER; note = 2'-deoxy-2'-fluorouridine-3'-phosphate
  modified_base 15: mod_base = OTHER; note = 2'-O-methylcytidine-3'-phosphate
  modified_base 16: mod_base = OTHER; note = 2'-deoxy-2'-fluorocytidine-3'-phosphate
  modified_base 17: mod_base = OTHER; note = 2'-O-methyluridine-3'-phosphate
  modified_base 18: mod_base = OTHER; note = 2'-O-methylcytidine-3'-phosphate
  modified_base 19: mod_base = OTHER; note = 2'-O-methylcytidine-3'-phosphate
  modified_base 20: mod_base = OTHER; note = 2'-O-methylcytidine-3'-phosphate
  modified_base 21: mod_base = OTHER; note = 2'-O-methylguanosine-3'-phosphorothioate
  modified_base 22: mod_base = OTHER; note = 2'-O-methyluridine-3'-phosphorothioate
  modified_base 23: mod_base = OTHER; note = 2'-O-methyluridine
ttcagcatccaggtcctcccgtt

SEQ ID NO: 534 - RNA, 23 nt, synthetic construct
  source 1..23: mol_type = other RNA
  modified_base 1: mod_base = OTHER; note = 2'-O-methyluridine-3'-phosphorothioate 5'-(E)-Vinylphosphonate
  modified_base 2: mod_base = OTHER; note = 2'-deoxy-2'-fluorouridine-3'-phosphorothioate
  modified_base 3: mod_base = OTHER; note = 2'-O-methylguanosine-3'-phosphate
  modified_base 4: mod_base = OTHER; note = 2'-O-methylcytidine-3'-phosphate
  modified_base 5: mod_base = OTHER; note = 2'-O-methyluridine-3'-phosphate
  modified_base 6: mod_base = OTHER; note = 2'-deoxy-2'-fluoroguanosine-3'-phosphate
  modified_base 7: mod_base = OTHER; note = 2'-O-methylcytidine-3'-phosphate
  modified_base 8: mod_base = OTHER; note = 2'-deoxy-2'-fluorouridine-3'-phosphate
  modified_base 9: mod_base = OTHER; note = 2'-deoxy-2'-fluorocytidine-3'-phosphate
  modified_base 10: mod_base = OTHER; note = 2'-O-methyladenosine-3'-phosphate
  modified_base 11: mod_base = OTHER; note = 2'-O-methyluridine-3'-phosphate
  modified_base 12: mod_base = OTHER; note = 2'-O-methylcytidine-3'-phosphate
  modified_base 13: mod_base = OTHER; note = 2'-O-methyladenosine-3'-phosphate
  modified_base 14: mod_base = OTHER; note = 2'-deoxy-2'-fluoroguanosine-3'-phosphate
  modified_base 15: mod_base = OTHER; note = 2'-O-methylcytidine-3'-phosphate
  modified_base 16: mod_base = OTHER; note = 2'-deoxy-2'-fluoroadenosine-3'-phosphate
  modified_base 17: mod_base = OTHER; note = 2'-O-methyluridine-3'-phosphate
  modified_base 18: mod_base = OTHER; note = 2'-O-methylcytidine-3'-phosphate
  modified_base 19: mod_base = OTHER; note = 2'-O-methylcytidine-3'-phosphate
  modified_base 20: mod_base = OTHER; note = 2'-O-methyladenosine-3'-phosphate
  modified_base 21: mod_base = OTHER; note = 2'-O-methylguanosine-3'-phosphorothioate
  modified_base 22: mod_base = OTHER; note = 2'-O-methylguanosine-3'-phosphorothioate
  modified_base 23: mod_base = OTHER; note = 2'-O-methyluridine
ttgctgctcatcagcatccaggt

SEQ ID NO: 535 - RNA, 23 nt, synthetic construct
  source 1..23: mol_type = other RNA
  modified_base 1: mod_base = OTHER; note = 2'-O-methyluridine-3'-phosphorothioate 5'-(E)-Vinylphosphonate
  modified_base 2: mod_base = OTHER; note = 2'-deoxy-2'-fluoroguanosine-3'-phosphorothioate
  modified_base 3: mod_base = OTHER; note = 2'-O-methyladenosine-3'-phosphate
  modified_base 4: mod_base = OTHER; note = 2'-O-methylguanosine-3'-phosphate
  modified_base 5: mod_base = OTHER; note = 2'-O-methylguanosine-3'-phosphate
  modified_base 6: mod_base = OTHER; note = 2'-deoxy-2'-fluoroadenosine-3'-phosphate
  modified_base 7: mod_base = OTHER; note = 2'-O-methylguanosine-3'-phosphate
  modified_base 8: mod_base = OTHER; note = 2'-deoxy-2'-fluorocytidine-3'-phosphate
  modified_base 9: mod_base = OTHER; note = 2'-deoxy-2'-fluorocytidine-3'-phosphate
  modified_base 10: mod_base = OTHER; note = 2'-O-methyluridine-3'-phosphate
  modified_base 11: mod_base = OTHER; note = 2'-O-methyluridine-3'-phosphate
  modified_base 12: mod_base = OTHER; note = 2'-O-methylguanosine-3'-phosphate
  modified_base 13: mod_base = OTHER; note = 2'-O-methylcytidine-3'-phosphate
  modified_base 14: mod_base = OTHER; note = 2'-deoxy-2'-fluorouridine-3'-phosphate
  modified_base 15: mod_base = OTHER; note = 2'-O-methylguanosine-3'-phosphate
  modified_base 16: mod_base = OTHER; note = 2'-deoxy-2'-fluorocytidine-3'-phosphate
  modified_base 17: mod_base = OTHER; note = 2'-O-methyluridine-3'-phosphate
  modified_base 18: mod_base = OTHER; note = 2'-O-methylcytidine-3'-phosphate
  modified_base 19: mod_base = OTHER; note = 2'-O-methyladenosine-3'-phosphate
  modified_base 20: mod_base = OTHER; note = 2'-O-methyluridine-3'-phosphate
  modified_base 21: mod_base = OTHER; note = 2'-O-methylcytidine-3'-phosphorothioate
  modified_base 22: mod_base = OTHER; note = 2'-O-methyladenosine-3'-phosphorothioate
  modified_base 23: mod_base = OTHER; note = 2'-O-methylguanosine
tgaggagccttgctgctcatcag

SEQ ID NO: 536 - RNA, 23 nt, synthetic construct
  source 1..23: mol_type = other RNA
  modified_base 1: mod_base = OTHER; note = 2'-O-methyluridine-3'-phosphorothioate 5'-(E)-Vinylphosphonate
  modified_base 2: mod_base = OTHER; note = 2'-deoxy-2'-fluoroadenosine-3'-phosphorothioate
  modified_base 3: mod_base = OTHER; note = 2'-O-methylcytidine-3'-phosphate
  modified_base 4: mod_base = OTHER; note = 2'-O-methyladenosine-3'-phosphate
  modified_base 5: mod_base = OTHER; note = 2'-O-methylguanosine-3'-phosphate
  modified_base 6: mod_base = OTHER; note = 2'-deoxy-2'-fluoroguanosine-3'-phosphate
  modified_base 7: mod_base = OTHER; note = 2'-O-methylguanosine-3'-phosphate
  modified_base 8: mod_base = OTHER; note = 2'-deoxy-2'-fluoroadenosine-3'-phosphate
  modified_base 9: mod_base = OTHER; note = 2'-deoxy-2'-fluoroguanosine-3'-phosphate
  modified_base 10: mod_base = OTHER; note = 2'-O-methyluridine-3'-phosphate
  modified_base 11: mod_base = OTHER; note = 2'-O-methylguanosine-3'-phosphate
  modified_base 12: mod_base = OTHER; note = 2'-O-methyladenosine-3'-phosphate
  modified_base 13: mod_base = OTHER; note = 2'-O-methylguanosine-3'-phosphate
  modified_base 14: mod_base = OTHER; note = 2'-deoxy-2'-fluoroguanosine-3'-phosphate
  modified_base 15: mod_base = OTHER; note = 2'-O-methyladenosine-3'-phosphate
  modified_base 16: mod_base = OTHER; note = 2'-deoxy-2'-fluoroguanosine-3'-phosphate
  modified_base 17: mod_base = OTHER; note = 2'-O-methylcytidine-3'-phosphate
  modified_base 18: mod_base = OTHER; note = 2'-O-methylcytidine-3'-phosphate
  modified_base 19: mod_base = OTHER; note = 2'-O-methyluridine-3'-phosphate
  modified_base 20: mod_base = OTHER; note = 2'-O-methyluridine-3'-phosphate
  modified_base 21: mod_base = OTHER; note = 2'-O-methylguanosine-3'-phosphorothioate
  modified_base 22: mod_base = OTHER; note = 2'-O-methylcytidine-3'-phosphorothioate
  modified_base 23: mod_base = OTHER; note = 2'-O-methyluridine
tacagggagtgaggagccttgct

SEQ ID NO: 537 - RNA, 23 nt, synthetic construct
  source 1..23: mol_type = other RNA
  modified_base 1: mod_base = OTHER; note = 2'-O-methyluridine-3'-phosphorothioate 5'-(E)-Vinylphosphonate
  modified_base 2: mod_base = OTHER; note = 2'-deoxy-2'-fluorocytidine-3'-phosphorothioate
  modified_base 3: mod_base = OTHER; note = 2'-O-methyladenosine-3'-phosphate
  modified_base 4: mod_base = OTHER; note = 2'-O-methylcytidine-3'-phosphate
  modified_base 5: mod_base = OTHER; note = 2'-O-methylcytidine-3'-phosphate
  modified_base 6: mod_base = OTHER; note = 2'-deoxy-2'-fluorocytidine-3'-phosphate
  modified_base 7: mod_base = OTHER; note = 2'-O-methyladenosine-3'-phosphate
  modified_base 8: mod_base = OTHER; note = 2'-deoxy-2'-fluorouridine-3'-phosphate
  modified_base 9: mod_base = OTHER; note = 2'-deoxy-2'-fluorouridine-3'-phosphate
  modified_base 10: mod_base = OTHER; note = 2'-O-methylcytidine-3'-phosphate
  modified_base 11: mod_base = OTHER; note = 2'-O-methyluridine-3'-phosphate
  modified_base 12: mod_base = OTHER; note = 2'-O-methylguanosine-3'-phosphate
  modified_base 13: mod_base = OTHER; note = 2'-O-methyluridine-3'-phosphate
  modified_base 14: mod_base = OTHER; note = 2'-deoxy-2'-fluoroadenosine-3'-phosphate
  modified_base 15: mod_base = OTHER; note = 2'-O-methylcytidine-3'-phosphate
  modified_base 16: mod_base = OTHER; note = 2'-deoxy-2'-fluoroadenosine-3'-phosphate
  modified_base 17: mod_base = OTHER; note = 2'-O-methylguanosine-3'-phosphate
  modified_base 18: mod_base = OTHER; note = 2'-O-methylguanosine-3'-phosphate
  modified_base 19: mod_base = OTHER; note = 2'-O-methylguanosine-3'-phosphate
  modified_base 20: mod_base = OTHER; note = 2'-O-methyladenosine-3'-phosphate
  modified_base 21: mod_base = OTHER; note = 2'-O-methylguanosine-3'-phosphorothioate
  modified_base 22: mod_base = OTHER; note = 2'-O-methyluridine-3'-phosphorothioate
  modified_base 23: mod_base = OTHER; note = 2'-O-methylguanosine
tcacccattctgtacagggagtg

SEQ ID NO: 538 - RNA, 23 nt, synthetic construct
  source 1..23: mol_type = other RNA
  modified_base 1: mod_base = OTHER; note = 2'-O-methyluridine-3'-phosphorothioate 5'-(E)-Vinylphosphonate
  modified_base 2: mod_base = OTHER; note = 2'-deoxy-2'-fluorouridine-3'-phosphorothioate
  modified_base 3: mod_base = OTHER; note = 2'-O-methylcytidine-3'-phosphate
  modified_base 4: mod_base = OTHER; note = 2'-O-methylcytidine-3'-phosphate
  modified_base 5: mod_base = OTHER; note = 2'-O-methyladenosine-3'-phosphate
  modified_base 6: mod_base = OTHER; note = 2'-deoxy-2'-fluorouridine-3'-phosphate
  modified_base 7: mod_base = OTHER; note = 2'-O-methylguanosine-3'-phosphate
  modified_base 8: mod_base = OTHER; note = 2'-deoxy-2'-fluoroguanosine-3'-phosphate
  modified_base 9: mod_base = OTHER; note = 2'-deoxy-2'-fluorocytidine-3'-phosphate
  modified_base 10: mod_base = OTHER; note = 2'-O-methyladenosine-3'-phosphate
  modified_base 11: mod_base = OTHER; note = 2'-O-methylcytidine-3'-phosphate
  modified_base 12: mod_base = OTHER; note = 2'-O-methyluridine-3'-phosphate
  modified_base 13: mod_base = OTHER; note = 2'-O-methylcytidine-3'-phosphate
  modified_base 14: mod_base = OTHER; note = 2'-deoxy-2'-fluorouridine-3'-phosphate
  modified_base 15: mod_base = OTHER; note = 2'-O-methylcytidine-3'-phosphate
  modified_base 16: mod_base = OTHER; note = 2'-deoxy-2'-fluorouridine-3'-phosphate
  modified_base 17: mod_base = OTHER; note = 2'-O-methylguanosine-3'-phosphate
  modified_base 18: mod_base = OTHER; note = 2'-O-methylguanosine-3'-phosphate
  modified_base 19: mod_base = OTHER; note = 2'-O-methylguanosine-3'-phosphate
  modified_base 20: mod_base = OTHER; note = 2'-O-methylcytidine-3'-phosphate
  modified_base 21: mod_base = OTHER; note = 2'-O-methyladenosine-3'-phosphorothioate
  modified_base 22: mod_base = OTHER; note = 2'-O-methylcytidine-3'-phosphorothioate
  modified_base 23: mod_base = OTHER; note = 2'-O-methylcytidine
ttccatggcactctctgggcacc

SEQ ID NO: 539 - RNA, 23 nt, synthetic construct
  source 1..23: mol_type = other RNA
  modified_base 1: mod_base = OTHER; note = 2'-O-methyluridine-3'-phosphorothioate 5'-(E)-Vinylphosphonate
  modified_base 2: mod_base = OTHER; note = 2'-deoxy-2'-fluoroguanosine-3'-phosphorothioate
  modified_base 3: mod_base = OTHER; note = 2'-O-methylguanosine-3'-phosphate
  modified_base 4: mod_base = OTHER; note = 2'-O-methylcytidine-3'-phosphate
  modified_base 5: mod_base = OTHER; note = 2'-O-methyluridine-3'-phosphate
  modified_base 6: mod_base = OTHER; note = 2'-deoxy-2'-fluorocytidine-3'-phosphate
  modified_base 7: mod_base = OTHER; note = 2'-O-methyladenosine-3'-phosphate
  modified_base 8: mod_base = OTHER; note = 2'-deoxy-2'-fluorouridine-3'-phosphate
  modified_base 9: mod_base = OTHER; note = 2'-deoxy-2'-fluorouridine-3'-phosphate
  modified_base 10: mod_base = OTHER; note = 2'-O-methylcytidine-3'-phosphate
  modified_base 11: mod_base = OTHER; note = 2'-O-methyladenosine-3'-phosphate
  modified_base 12: mod_base = OTHER; note = 2'-O-methyluridine-3'-phosphate
  modified_base 13: mod_base = OTHER; note = 2'-O-methylcytidine-3'-phosphate
  modified_base 14: mod_base = OTHER; note = 2'-deoxy-2'-fluorouridine-3'-phosphate
  modified_base 15: mod_base = OTHER; note = 2'-O-methylcytidine-3'-phosphate
  modified_base 16: mod_base = OTHER; note = 2'-deoxy-2'-fluorocytidine-3'-phosphate
  modified_base 17: mod_base = OTHER; note = 2'-O-methyladenosine-3'-phosphate
  modified_base 18: mod_base = OTHER; note = 2'-O-methyluridine-3'-phosphate
  modified_base 19: mod_base = OTHER; note = 2'-O-methylguanosine-3'-phosphate
  modified_base 20: mod_base = OTHER; note = 2'-O-methylguanosine-3'-phosphate
  modified_base 21: mod_base = OTHER; note = 2'-O-methylcytidine-3'-phosphorothioate
  modified_base 22: mod_base = OTHER; note = 2'-O-methyladenosine-3'-phosphorothioate
  modified_base 23: mod_base = OTHER; note = 2'-O-methylcytidine
tggctcattcatctccatggcac

SEQ ID NO: 540 - RNA, 23 nt, synthetic construct
  source 1..23: mol_type = other RNA
  modified_base 1: mod_base = OTHER; note = 2'-O-methyluridine-3'-phosphorothioate 5'-(E)-Vinylphosphonate
  modified_base 2: mod_base = OTHER; note = 2'-deoxy-2'-fluoroadenosine-3'-phosphorothioate
  modified_base 3: mod_base = OTHER; note = 2'-O-methylcytidine-3'-phosphate
  modified_base 4: mod_base = OTHER; note = 2'-O-methyluridine-3'-phosphate
  modified_base 5: mod_base = OTHER; note = 2'-O-methylguanosine-3'-phosphate
  modified_base 6: mod_base = OTHER; note = 2'-deoxy-2'-fluoroguanosine-3'-phosphate
  modified_base 7: mod_base = OTHER; note = 2'-O-methylcytidine-3'-phosphate
  modified_base 8: mod_base = OTHER; note = 2'-deoxy-2'-fluoroguanosine-3'-phosphate
  modified_base 9: mod_base = OTHER; note = 2'-deoxy-2'-fluoroguanosine-3'-phosphate
  modified_base 10: mod_base = OTHER; note = 2'-O-methyladenosine-3'-phosphate
  modified_base 11: mod_base = OTHER; note = 2'-O-methyladenosine-3'-phosphate
  modified_base 12: mod_base = OTHER; note = 2'-O-methylguanosine-3'-phosphate
  modified_base 13: mod_base = OTHER; note = 2'-O-methyladenosine-3'-phosphate
  modified_base 14: mod_base = OTHER; note = 2'-deoxy-2'-fluoroguanosine-3'-phosphate
  modified_base 15: mod_base = OTHER; note = 2'-O-methylguanosine-3'-phosphate
  modified_base 16: mod_base = OTHER; note = 2'-deoxy-2'-fluorocytidine-3'-phosphate
  modified_base 17: mod_base = OTHER; note = 2'-O-methyluridine-3'-phosphate
  modified_base 18: mod_base = OTHER; note = 2'-O-methyluridine-3'-phosphate
  modified_base 19: mod_base = OTHER; note = 2'-O-methylguanosine-3'-phosphate
  modified_base 20: mod_base = OTHER; note = 2'-O-methylguanosine-3'-phosphate
  modified_base 21: mod_base = OTHER; note = 2'-O-methyluridine-3'-phosphorothioate
  modified_base 22: mod_base = OTHER; note = 2'-O-methylguanosine-3'-phosphorothioate
  modified_base 23: mod_base = OTHER; note = 2'-O-methylcytidine
tactggcggaagaggcttggtgc

SEQ ID NO: 541 - RNA, 23 nt, synthetic construct
  source 1..23: mol_type = other RNA
  modified_base 1: mod_base = OTHER; note = 2'-O-methyluridine-3'-phosphorothioate 5'-(E)-Vinylphosphonate
  modified_base 2: mod_base = OTHER; note = 2'-deoxy-2'-fluorocytidine-3'-phosphorothioate
  modified_base 3: mod_base = OTHER; note = 2'-O-methyladenosine-3'-phosphate
  modified_base 4: mod_base = OTHER; note = 2'-O-methyladenosine-3'-phosphate
  modified_base 5: mod_base = OTHER; note = 2'-O-methyladenosine-3'-phosphate
  modified_base 6: mod_base = OTHER; note = 2'-deoxy-2'-fluoroadenosine-3'-phosphate
  modified_base 7: mod_base = OTHER; note = 2'-O-methylcytidine-3'-phosphate
  modified_base 8: mod_base = OTHER; note = 2'-deoxy-2'-fluorocytidine-3'-phosphate
  modified_base 9: mod_base = OTHER; note = 2'-deoxy-2'-fluoroadenosine-3'-phosphate
  modified_base 10: mod_base = OTHER; note = 2'-O-methylguanosine-3'-phosphate
  modified_base 11: mod_base = OTHER; note = 2'-O-methyladenosine-3'-phosphate
  modified_base 12: mod_base = OTHER; note = 2'-O-methylguanosine-3'-phosphate
  modified_base 13: mod_base = OTHER; note = 2'-O-methylcytidine-3'-phosphate
  modified_base 14: mod_base = OTHER; note = 2'-deoxy-2'-fluoroadenosine-3'-phosphate
  modified_base 15: mod_base = OTHER; note = 2'-O-methylguanosine-3'-phosphate
  modified_base 16: mod_base = OTHER; note = 2'-deoxy-2'-fluoroguanosine-3'-phosphate
  modified_base 17: mod_base = OTHER; note = 2'-O-methylcytidine-3'-phosphate
  modified_base 18: mod_base = OTHER; note = 2'-O-methyladenosine-3'-phosphate
  modified_base 19: mod_base = OTHER; note = 2'-O-methylcytidine-3'-phosphate
  modified_base 20: mod_base = OTHER; note = 2'-O-methyluridine-3'-phosphate
  modified_base 21: mod_base = OTHER; note = 2'-O-methylguanosine-3'-phosphorothioate
  modified_base 22: mod_base = OTHER; note = 2'-O-methylguanosine-3'-phosphorothioate
  modified_base 23: mod_base = OTHER; note = 2'-O-methylcytidine
tcaaaaccagagcaggcactggc

SEQ ID NO: 542 - RNA, 23 nt, synthetic construct
  source 1..23: mol_type = other RNA
  modified_base 1: mod_base = OTHER; note = 2'-O-methyluridine-3'-phosphorothioate 5'-(E)-Vinylphosphonate
  modified_base 2: mod_base = OTHER; note = 2'-deoxy-2'-fluorouridine-3'-phosphorothioate
  modified_base 3: mod_base = OTHER; note = 2'-O-methylguanosine-3'-phosphate
  modified_base 4: mod_base = OTHER; note = 2'-O-methylcytidine-3'-phosphate
  modified_base 5: mod_base = OTHER; note = 2'-O-methyluridine-3'-phosphate
  modified_base 6: mod_base = OTHER; note = 2'-deoxy-2'-fluorocytidine-3'-phosphate
  modified_base 7: mod_base = OTHER; note = 2'-O-methyladenosine-3'-phosphate
  modified_base 8: mod_base = OTHER; note = 2'-deoxy-2'-fluorouridine-3'-phosphate
  modified_base 9: mod_base = OTHER; note = 2'-deoxy-2'-fluorouridine-3'-phosphate
  modified_base 10: mod_base = OTHER; note = 2'-O-methylcytidine-3'-phosphate
  modified_base 11: mod_base = OTHER; note = 2'-O-methylcytidine-3'-phosphate
  modified_base 12: mod_base = OTHER; note = 2'-O-methyladenosine-3'-phosphate
  modified_base 13: mod_base = OTHER; note = 2'-O-methylcytidine-3'-phosphate
  modified_base 14: mod_base = OTHER; note = 2'-deoxy-2'-fluoroadenosine-3'-phosphate
  modified_base 15: mod_base = OTHER; note = 2'-O-methyladenosine-3'-phosphate
  modified_base 16: mod_base = OTHER; note = 2'-deoxy-2'-fluoroadenosine-3'-phosphate
  modified_base 17: mod_base = OTHER; note = 2'-O-methyladenosine-3'-phosphate
  modified_base 18: mod_base = OTHER; note = 2'-O-methylcytidine-3'-phosphate
  modified_base 19: mod_base = OTHER; note = 2'-O-methylcytidine-3'-phosphate
  modified_base 20: mod_base = OTHER; note = 2'-O-methyladenosine-3'-phosphate
  modified_base 21: mod_base = OTHER; note = 2'-O-methylguanosine-3'-phosphorothioate
  modified_base 22: mod_base = OTHER; note = 2'-O-methyladenosine-3'-phosphorothioate
  modified_base 23: mod_base = OTHER; note = 2'-O-methylguanosine
ttgctcattccacaaaaccagag

SEQ ID NO: 543 - RNA, 23 nt, synthetic construct
  source 1..23: mol_type = other RNA
  modified_base 1: mod_base = OTHER; note = 2'-O-methyluridine-3'-phosphorothioate 5'-(E)-Vinylphosphonate
  modified_base 2: mod_base = OTHER; note = 2'-deoxy-2'-fluorouridine-3'-phosphorothioate
  modified_base 3: mod_base = OTHER; note = 2'-O-methylcytidine-3'-phosphate
  modified_base 4: mod_base = OTHER; note = 2'-O-methylcytidine-3'-phosphate
  modified_base 5: mod_base = OTHER; note = 2'-O-methyluridine-3'-phosphate
  modified_base 6: mod_base = OTHER; note = 2'-deoxy-2'-fluorocytidine-3'-phosphate
  modified_base 7: mod_base = OTHER; note = 2'-O-methylguanosine-3'-phosphate
  modified_base 8: mod_base = OTHER; note = 2'-deoxy-2'-fluorocytidine-3'-phosphate
  modified_base 9: mod_base = OTHER; note = 2'-deoxy-2'-fluorouridine-3'-phosphate
  modified_base 10: mod_base = OTHER; note = 2'-O-methylguanosine-3'-phosphate
  modified_base 11: mod_base = OTHER; note = 2'-O-methyladenosine-3'-phosphate
  modified_base 12: mod_base = OTHER; note = 2'-O-methyluridine-3'-phosphate
  modified_base 13: mod_base = OTHER; note = 2'-O-methylguanosine-3'-phosphate
  modified_base 14: mod_base = OTHER; note = 2'-deoxy-2'-fluorouridine-3'-phosphate
  modified_base 15: mod_base = OTHER; note = 2'-O-methylcytidine-3'-phosphate
  modified_base 16: mod_base = OTHER; note = 2'-deoxy-2'-fluorocytidine-3'-phosphate
  modified_base 17: mod_base = OTHER; note = 2'-O-methyluridine-3'-phosphate
  modified_base 18: mod_base = OTHER; note = 2'-O-methylcytidine-3'-phosphate
  modified_base 19: mod_base = OTHER; note = 2'-O-methylcytidine-3'-phosphate
  modified_base 20: mod_base = OTHER; note = 2'-O-methyladenosine-3'-phosphate
  modified_base 21: mod_base = OTHER; note = 2'-O-methylguanosine-3'-phosphorothioate
  modified_base 22: mod_base = OTHER; note = 2'-O-methylcytidine-3'-phosphorothioate
  modified_base 23: mod_base = OTHER; note = 2'-O-methylcytidine
ttcctcgctgatgtcctccagcc

SEQ ID NO: 544 - RNA, 23 nt, synthetic construct
  source 1..23: mol_type = other RNA
  modified_base 1: mod_base = OTHER; note = 2'-O-methyluridine-3'-phosphorothioate 5'-(E)-Vinylphosphonate
  modified_base 2: mod_base = OTHER; note = 2'-deoxy-2'-fluorocytidine-3'-phosphorothioate
  modified_base 3: mod_base = OTHER; note = 2'-O-methyladenosine-3'-phosphate
  modified_base 4: mod_base = OTHER; note = 2'-O-methylguanosine-3'-phosphate
  modified_base 5: mod_base = OTHER; note = 2'-O-methylcytidine-3'-phosphate
  modified_base 6: mod_base = OTHER; note = 2'-deoxy-2'-fluorouridine-3'-phosphate
  modified_base 7: mod_base = OTHER; note = 2'-O-methylcytidine-3'-phosphate
  modified_base 8: mod_base = OTHER; note = 2'-deoxy-2'-fluoroguanosine-3'-phosphate
  modified_base 9: mod_base = OTHER; note = 2'-deoxy-2'-fluoroguanosine-3'-phosphate
  modified_base 10: mod_base = OTHER; note = 2'-O-methylguanosine-3'-phosphate
  modified_base 11: mod_base = OTHER; note = 2'-O-methyluridine-3'-phosphate
  modified_base 12: mod_base = OTHER; note = 2'-O-methylcytidine-3'-phosphate
  modified_base 13: mod_base = OTHER; note = 2'-O-methylcytidine-3'-phosphate
  modified_base 14: mod_base = OTHER; note = 2'-deoxy-2'-fluorouridine-3'-phosphate
  modified_base 15: mod_base = OTHER; note = 2'-O-methylcytidine-3'-phosphate
  modified_base 16: mod_base = OTHER; note = 2'-deoxy-2'-fluoroguanosine-3'-phosphate
  modified_base 17: mod_base = OTHER; note = 2'-O-methylcytidine-3'-phosphate
  modified_base 18: mod_base = OTHER; note = 2'-O-methyluridine-3'-phosphate
  modified_base 19: mod_base = OTHER; note = 2'-O-methylguanosine-3'-phosphate
  modified_base 20: mod_base = OTHER; note = 2'-O-methyladenosine-3'-phosphate
  modified_base 21: mod_base = OTHER; note = 2'-O-methyluridine-3'-phosphorothioate
  modified_base 22: mod_base = OTHER; note = 2'-O-methylguanosine-3'-phosphorothioate
  modified_base 23: mod_base = OTHER; note = 2'-O-methyluridine
tcagctcgggtcctcgctgatgt

SEQ ID NO: 545 - RNA, 23 nt, synthetic construct
  source 1..23: mol_type = other RNA
  modified_base 1: mod_base = OTHER; note = 2'-O-methyluridine-3'-phosphorothioate 5'-(E)-Vinylphosphonate
  modified_base 2: mod_base = OTHER; note = 2'-deoxy-2'-fluoroguanosine-3'-phosphorothioate
  modified_base 3: mod_base = OTHER; note = 2'-O-methylcytidine-3'-phosphate
  modified_base 4: mod_base = OTHER; note = 2'-O-methyladenosine-3'-phosphate
  modified_base 5: mod_base = OTHER; note = 2'-O-methyluridine-3'-phosphate
  modified_base 6: mod_base = OTHER; note = 2'-deoxy-2'-fluorouridine-3'-phosphate
  modified_base 7: mod_base = OTHER; note = 2'-O-methylguanosine-3'-phosphate
  modified_base 8: mod_base = OTHER; note = 2'-deoxy-2'-fluoroadenosine-3'-phosphate
  modified_base 9: mod_base = OTHER; note = 2'-deoxy-2'-fluoroguanosine-3'-phosphate
  modified_base 10: mod_base = OTHER; note = 2'-O-methylguanosine-3'-phosphate
  modified_base 11: mod_base = OTHER; note = 2'-O-methyluridine-3'-phosphate
  modified_base 12: mod_base = OTHER; note = 2'-O-methyluridine-3'-phosphate
  modified_base 13: mod_base = OTHER; note = 2'-O-methylguanosine-3'-phosphate
  modified_base 14: mod_base = OTHER; note = 2'-deoxy-2'-fluoroadenosine-3'-phosphate
  modified_base 15: mod_base = OTHER; note = 2'-O-methylcytidine-3'-phosphate
  modified_base 16: mod_base = OTHER; note = 2'-deoxy-2'-fluorocytidine-3'-phosphate
  modified_base 17: mod_base = OTHER; note = 2'-O-methyladenosine-3'-phosphate
  modified_base 18: mod_base = OTHER; note = 2'-O-methylcytidine-3'-phosphate
  modified_base 19: mod_base = OTHER; note = 2'-O-methyladenosine-3'-phosphate
  modified_base 20: mod_base = OTHER; note = 2'-O-methylcytidine-3'-phosphate
  modified_base 21: mod_base = OTHER; note = 2'-O-methylguanosine-3'-phosphorothioate
  modified_base 22: mod_base = OTHER; note = 2'-O-methylguanosine-3'-phosphorothioate
  modified_base 23: mod_base = OTHER; note = 2'-O-methylguanosine
tgcattgaggttgaccacacggg

SEQ ID NO: 546 - RNA, 23 nt, synthetic construct
  source 1..23: mol_type = other RNA
  modified_base 1: mod_base = OTHER; note = 2'-O-methyluridine-3'-phosphorothioate 5'-(E)-Vinylphosphonate
  modified_base 2: mod_base = OTHER; note = 2'-deoxy-2'-fluoroadenosine-3'-phosphorothioate
  modified_base 3: mod_base = OTHER; note = 2'-O-methyluridine-3'-phosphate
  modified_base 4: mod_base = OTHER; note = 2'-O-methylguanosine-3'-phosphate
  modified_base 5: mod_base = OTHER; note = 2'-O-methyladenosine-3'-phosphate
  modified_base 6: mod_base = OTHER; note = 2'-deoxy-2'-fluoroguanosine-3'-phosphate
  modified_base 7: mod_base = OTHER; note = 2'-O-methylcytidine-3'-phosphate
  modified_base 8: mod_base = OTHER; note = 2'-deoxy-2'-fluoroadenosine-3'-phosphate
  modified_base 9: mod_base = OTHER; note = 2'-deoxy-2'-fluoroguanosine-3'-phosphate
  modified_base 10: mod_base = OTHER; note = 2'-O-methylguanosine-3'-phosphate
  modified_base 11: mod_base = OTHER; note = 2'-O-methylguanosine-3'-phosphate
  modified_base 12: mod_base = OTHER; note = 2'-O-methylcytidine-3'-phosphate
  modified_base 13: mod_base = OTHER; note = 2'-O-methyladenosine-3'-phosphate
  modified_base 14: mod_base = OTHER; note = 2'-deoxy-2'-fluorouridine-3'-phosphate
  modified_base 15: mod_base = OTHER; note = 2'-O-methyluridine-3'-phosphate
  modified_base 16: mod_base = OTHER; note = 2'-deoxy-2'-fluoroguanosine-3'-phosphate
  modified_base 17: mod_base = OTHER; note = 2'-O-methyladenosine-3'-phosphate
  modified_base 18: mod_base = OTHER; note = 2'-O-methylguanosine-3'-phosphate
  modified_base 19: mod_base = OTHER; note = 2'-O-methylguanosine-3'-phosphate
  modified_base 20: mod_base = OTHER; note = 2'-O-methyluridine-3'-phosphate
  modified_base 21: mod_base = OTHER; note = 2'-O-methyluridine-3'-phosphorothioate
  modified_base 22: mod_base = OTHER; note = 2'-O-methylguanosine-3'-phosphorothioate
  modified_base 23: mod_base = OTHER; note = 2'-O-methyladenosine
tatgagcagggcattgaggttga

SEQ ID NO: 547 - RNA, 23 nt, synthetic construct
  source 1..23: mol_type = other RNA
  modified_base 1: mod_base = OTHER; note = 2'-O-methyluridine-3'-phosphorothioate 5'-(E)-Vinylphosphonate
  modified_base 2: mod_base = OTHER; note = 2'-deoxy-2'-fluorocytidine-3'-phosphorothioate
  modified_base 3: mod_base = OTHER; note = 2'-O-methylcytidine-3'-phosphate
  modified_base 4: mod_base = OTHER; note = 2'-O-methyladenosine-3'-phosphate
  modified_base 5: mod_base = OTHER; note = 2'-O-methylcytidine-3'-phosphate
  modified_base 6: mod_base = OTHER; note = 2'-deoxy-2'-fluorouridine-3'-phosphate
  modified_base 7: mod_base = OTHER; note = 2'-O-methylguanosine-3'-phosphate
  modified_base 8: mod_base = OTHER; note = 2'-deoxy-2'-fluorocytidine-3'-phosphate
  modified_base 9: mod_base = OTHER; note = 2'-deoxy-2'-fluorocytidine-3'-phosphate
  modified_base 10: mod_base = OTHER; note = 2'-O-methyladenosine-3'-phosphate
  modified_base 11: mod_base = OTHER; note = 2'-O-methyluridine-3'-phosphate
  modified_base 12: mod_base = OTHER; note = 2'-O-methylcytidine-3'-phosphate
  modified_base 13: mod_base = OTHER; note = 2'-O-methyladenosine-3'-phosphate
  modified_base 14: mod_base = OTHER; note = 2'-deoxy-2'-fluorouridine-3'-phosphate
  modified_base 15: mod_base = OTHER; note = 2'-O-methylguanosine-3'-phosphate
  modified_base 16: mod_base = OTHER; note = 2'-deoxy-2'-fluoroadenosine-3'-phosphate
  modified_base 17: mod_base = OTHER; note = 2'-O-methylguanosine-3'-phosphate
  modified_base 18: mod_base = OTHER; note = 2'-O-methylcytidine-3'-phosphate
  modified_base 19: mod_base = OTHER; note = 2'-O-methyladenosine-3'-phosphate
  modified_base 20: mod_base = OTHER; note = 2'-O-methylguanosine-3'-phosphate
  modified_base 21: mod_base = OTHER; note = 2'-O-methylguanosine-3'-phosphorothioate
  modified_base 22: mod_base = OTHER; note = 2'-O-methylguanosine-3'-phosphorothioate
  modified_base 23: mod_base = OTHER; note = 2'-O-methylcytidine
tccactgccatcatgagcagggc

SEQ ID NO: 548 - RNA, 23 nt, synthetic construct
  source 1..23: mol_type = other RNA
  modified_base 1: mod_base = OTHER; note = 2'-O-methyluridine-3'-phosphorothioate 5'-(E)-Vinylphosphonate
  modified_base 2: mod_base = OTHER; note = 2'-deoxy-2'-fluorocytidine-3'-phosphorothioate
  modified_base 3: mod_base = OTHER; note = 2'-O-methyladenosine-3'-phosphate
  modified_base 4: mod_base = OTHER; note = 2'-O-methylguanosine-3'-phosphate
  modified_base 5: mod_base = OTHER; note = 2'-O-methyladenosine-3'-phosphate
  modified_base 6: mod_base = OTHER; note = 2'-deoxy-2'-fluoroguanosine-3'-phosphate
  modified_base 7: mod_base = OTHER; note = 2'-O-methylguanosine-3'-phosphate
  modified_base 8: mod_base = OTHER; note = 2'-deoxy-2'-fluoroadenosine-3'-phosphate
  modified_base 9: mod_base = OTHER; note = 2'-deoxy-2'-fluoroadenosine-3'-phosphate
  modified_base 10: mod_base = OTHER; note = 2'-O-methylcytidine-3'-phosphate
  modified_base 11: mod_base = OTHER; note = 2'-O-methyladenosine-3'-phosphate
  modified_base 12: mod_base = OTHER; note = 2'-O-methylcytidine-3'-phosphate
  modified_base 13: mod_base = OTHER; note = 2'-O-methylguanosine-3'-phosphate
  modified_base 14: mod_base = OTHER; note = 2'-deoxy-2'-fluoroguanosine-3'-phosphate
  modified_base 15: mod_base = OTHER; note = 2'-O-methylcytidine-3'-phosphate
  modified_base 16: mod_base = OTHER; note = 2'-deoxy-2'-fluorocytidine-3'-phosphate
  modified_base 17: mod_base = OTHER; note = 2'-O-methyladenosine-3'-phosphate
  modified_base 18: mod_base = OTHER; note = 2'-O-methylcytidine-3'-phosphate
  modified_base 19: mod_base = OTHER; note = 2'-O-methyluridine-3'-phosphate
  modified_base 20: mod_base = OTHER; note = 2'-O-methylguanosine-3'-phosphate
  modified_base 21: mod_base = OTHER; note = 2'-O-methylcytidine-3'-phosphorothioate
  modified_base 22: mod_base = OTHER; note = 2'-O-methylcytidine-3'-phosphorothioate
  modified_base 23: mod_base = OTHER; note = 2'-O-methyladenosine
tcagaggaacacggccactgcca

SEQ ID NO: 549 - RNA, 23 nt, synthetic construct
  source 1..23: mol_type = other RNA
  modified_base 1: mod_base = OTHER; note = 2'-O-methyluridine-3'-phosphorothioate 5'-(E)-Vinylphosphonate
  modified_base 2: mod_base = OTHER; note = 2'-deoxy-2'-fluorocytidine-3'-phosphorothioate
  modified_base 3: mod_base = OTHER; note = 2'-O-methyladenosine-3'-phosphate
  modified_base 4: mod_base = OTHER; note = 2'-O-methylguanosine-3'-phosphate
  modified_base 5: mod_base = OTHER; note = 2'-O-methyluridine-3'-phosphate
  modified_base 6: mod_base = OTHER; note = 2'-deoxy-2'-fluorouridine-3'-phosphate
  modified_base 7: mod_base = OTHER; note = 2'-O-methylguanosine-3'-phosphate
  modified_base 8: mod_base = OTHER; note = 2'-deoxy-2'-fluoroguanosine-3'-phosphate
  modified_base 9: mod_base = OTHER; note = 2'-deoxy-2'-fluorouridine-3'-phosphate
  modified_base 10: mod_base = OTHER; note = 2'-O-methylcytidine-3'-phosphate
  modified_base 11: mod_base = OTHER; note = 2'-O-methyluridine-3'-phosphate
  modified_base 12: mod_base = OTHER; note = 2'-O-methyluridine-3'-phosphate
  modified_base 13: mod_base = OTHER; note = 2'-O-methyladenosine-3'-phosphate
  modified_base 14: mod_base = OTHER; note = 2'-deoxy-2'-fluoroguanosine-3'-phosphate
  modified_base 15: mod_base = OTHER; note = 2'-O-methylguanosine-3'-phosphate
  modified_base 16: mod_base = OTHER; note = 2'-deoxy-2'-fluorocytidine-3'-phosphate
  modified_base 17: mod_base = OTHER; note = 2'-O-methyladenosine-3'-phosphate
  modified_base 18: mod_base = OTHER; note = 2'-O-methyluridine-3'-phosphate
  modified_base 19: mod_base = OTHER; note = 2'-O-methyladenosine-3'-phosphate
  modified_base 20: mod_base = OTHER; note = 2'-O-methylguanosine-3'-phosphate
  modified_base 21: mod_base = OTHER; note = 2'-O-methyladenosine-3'-phosphorothioate
  modified_base 22: mod_base = OTHER; note = 2'-O-methyladenosine-3'-phosphorothioate
  modified_base 23: mod_base = OTHER; note = 2'-O-methylguanosine
tcagttggtcttaggcatagaag

SEQ ID NO: 550 - RNA, 23 nt, synthetic construct
  source 1..23: mol_type = other RNA
  modified_base 1: mod_base = OTHER; note = 2'-O-methyluridine-3'-phosphorothioate 5'-(E)-Vinylphosphonate
  modified_base 2: mod_base = OTHER; note = 2'-deoxy-2'-fluorouridine-3'-phosphorothioate
  modified_base 3: mod_base = OTHER; note = 2'-O-methylguanosine-3'-phosphate
  modified_base 4: mod_base = OTHER; note = 2'-O-methyluridine-3'-phosphate
  modified_base 5: mod_base = OTHER; note = 2'-O-methylcytidine-3'-phosphate
  modified_base 6: mod_base = OTHER; note = 2'-deoxy-2'-fluorocytidine-3'-phosphate
  modified_base 7: mod_base = OTHER; note = 2'-O-methyladenosine-3'-phosphate
  modified_base 8: mod_base = OTHER; note = 2'-deoxy-2'-fluoroadenosine-3'-phosphate
  modified_base 9: mod_base = OTHER; note = 2'-deoxy-2'-fluorocytidine-3'-phosphate
  modified_base 10: mod_base = OTHER; note = 2'-O-methylguanosine-3'-phosphate
  modified_base 11: mod_base = OTHER; note = 2'-O-methylcytidine-3'-phosphate
  modified_base 12: mod_base = OTHER; note = 2'-O-methyladenosine-3'-phosphate
  modified_base 13: mod_base = OTHER; note = 2'-O-methylguanosine-3'-phosphate
  modified_base 14: mod_base = OTHER; note = 2'-deoxy-2'-fluorouridine-3'-phosphate
  modified_base 15: mod_base = OTHER; note = 2'-O-methyluridine-3'-phosphate
  modified_base 16: mod_base = OTHER; note = 2'-deoxy-2'-fluoroguanosine-3'-phosphate
  modified_base 17: mod_base = OTHER; note = 2'-O-methylguanosine-3'-phosphate
  modified_base 18: mod_base = OTHER; note = 2'-O-methyluridine-3'-phosphate
  modified_base 19: mod_base = OTHER; note = 2'-O-methylcytidine-3'-phosphate
  modified_base 20: mod_base = OTHER; note = 2'-O-methyluridine-3'-phosphate
  modified_base 21: mod_base = OTHER; note = 2'-O-methyluridine-3'-phosphorothioate
  modified_base 22: mod_base = OTHER; note = 2'-O-methyladenosine-3'-phosphorothioate
  modified_base 23: mod_base = OTHER; note = 2'-O-methylguanosine
ttgtccaacgcagttggtcttag

SEQ ID NO: 551 - RNA, 23 nt, synthetic construct
  source 1..23: mol_type = other RNA
  modified_base 1: mod_base = OTHER; note = 2'-O-methyluridine-3'-phosphorothioate 5'-(E)-Vinylphosphonate
  modified_base 2: mod_base = OTHER; note = 2'-deoxy-2'-fluorouridine-3'-phosphorothioate
  modified_base 3: mod_base = OTHER; note = 2'-O-methylguanosine-3'-phosphate
  modified_base 4: mod_base = OTHER; note = 2'-O-methylguanosine-3'-phosphate
  modified_base 5: mod_base = OTHER; note = 2'-O-methylcytidine-3'-phosphate
  modified_base 6: mod_base = OTHER; note = 2'-deoxy-2'-fluorouridine-3'-phosphate
  modified_base 7: mod_base = OTHER; note = 2'-O-methyluridine-3'-phosphate
  modified_base 8: mod_base = OTHER; note = 2'-deoxy-2'-fluoroadenosine-3'-phosphate
  modified_base 9: mod_base = OTHER; note = 2'-deoxy-2'-fluorouridine-3'-phosphate
  modified_base 10: mod_base = OTHER; note = 2'-O-methylguanosine-3'-phosphate
  modified_base 11: mod_base = OTHER; note = 2'-O-methylguanosine-3'-phosphate
  modified_base 12: mod_base = OTHER; note = 2'-O-methyluridine-3'-phosphate
  modified_base 13: mod_base = OTHER; note = 2'-O-methylguanosine-3'-phosphate
  modified_base 14: mod_base = OTHER; note = 2'-deoxy-2'-fluorouridine-3'-phosphate
  modified_base 15: mod_base = OTHER; note = 2'-O-methylcytidine-3'-phosphate
  modified_base 16: mod_base = OTHER; note = 2'-deoxy-2'-fluorocytidine-3'-phosphate
  modified_base 17: mod_base = OTHER; note = 2'-O-methyladenosine-3'-phosphate
  modified_base 18: mod_base = OTHER; note = 2'-O-methyladenosine-3'-phosphate
  modified_base 19: mod_base = OTHER; note = 2'-O-methylcytidine-3'-phosphate
  modified_base 20: mod_base = OTHER; note = 2'-O-methylguanosine-3'-phosphate
  modified_base 21: mod_base = OTHER; note = 2'-O-methylcytidine-3'-phosphorothioate
  modified_base 22: mod_base = OTHER; note = 2'-O-methyladenosine-3'-phosphorothioate
  modified_base 23: mod_base = OTHER; note = 2'-O-methylguanosine
ttggcttatggtgtccaacgcag

SEQ ID NO: 552 - RNA, 23 nt, synthetic construct
  source 1..23: mol_type = other RNA
  modified_base 1: mod_base = OTHER; note = 2'-O-methyluridine-3'-phosphorothioate 5'-(E)-Vinylphosphonate
  modified_base 2: mod_base = OTHER; note = 2'-deoxy-2'-fluorocytidine-3'-phosphorothioate
  modified_base 3: mod_base = OTHER; note = 2'-O-methyladenosine-3'-phosphate
  modified_base 4: mod_base = OTHER; note = 2'-O-methylcytidine-3'-phosphate
  modified_base 5: mod_base = OTHER; note = 2'-O-methyluridine-3'-phosphate
  modified_base 6: mod_base = OTHER; note = 2'-deoxy-2'-fluorouridine-3'-phosphate
  modified_base 7: mod_base = OTHER; note = 2'-O-methylcytidine-3'-phosphate
  modified_base 8: mod_base = OTHER; note = 2'-deoxy-2'-fluorocytidine-3'-phosphate
  modified_base 9: mod_base = OTHER; note = 2'-deoxy-2'-fluorouridine-3'-phosphate
  modified_base 10: mod_base = OTHER; note = 2'-O-methylguanosine-3'-phosphate
  modified_base 11: mod_base = OTHER; note = 2'-O-methyluridine-3'-phosphate
  modified_base 12: mod_base = OTHER; note = 2'-O-methylguanosine-3'-phosphate
  modified_base 13: mod_base = OTHER; note = 2'-O-methyladenosine-3'-phosphate
  modified_base 14: mod_base = OTHER; note = 2'-deoxy-2'-fluoroguanosine-3'-phosphate
  modified_base 15: mod_base = OTHER; note = 2'-O-methylguanosine-3'-phosphate
  modified_base 16: mod_base = OTHER; note = 2'-deoxy-2'-fluorocytidine-3'-phosphate
  modified_base 17: mod_base = OTHER; note = 2'-O-methyluridine-3'-phosphate
  modified_base 18: mod_base = OTHER; note = 2'-O-methylguanosine-3'-phosphate
  modified_base 19: mod_base = OTHER; note = 2'-O-methyluridine-3'-phosphate
  modified_base 20: mod_base = OTHER; note = 2'-O-methylguanosine-3'-phosphate
  modified_base 21: mod_base = OTHER; note = 2'-O-methylguanosine-3'-phosphorothioate
  modified_base 22: mod_base = OTHER; note = 2'-O-methylcytidine-3'-phosphorothioate
  modified_base 23: mod_base = OTHER; note = 2'-O-methyluridine
tcacttcctgtgaggctgtggct

SEQ ID NO: 553 - RNA, 23 nt, synthetic construct
  source 1..23: mol_type = other RNA
  modified_base 1: mod_base = OTHER; note = 2'-O-methyluridine-3'-phosphorothioate 5'-(E)-Vinylphosphonate
  modified_base 2: mod_base = OTHER; note = 2'-deoxy-2'-fluoroadenosine-3'-phosphorothioate
  modified_base 3: mod_base = OTHER; note = 2'-O-methylguanosine-3'-phosphate
  modified_base 4: mod_base = OTHER; note = 2'-O-methylguanosine-3'-phosphate
  modified_base 5: mod_base = OTHER; note = 2'-O-methylcytidine-3'-phosphate
  modified_base 6: mod_base = OTHER; note = 2'-deoxy-2'-fluoroadenosine-3'-phosphate
  modified_base 7: mod_base = OTHER; note = 2'-O-methylguanosine-3'-phosphate
  modified_base 8: mod_base = OTHER; note = 2'-deoxy-2'-fluoroadenosine-3'-phosphate
  modified_base 9: mod_base = OTHER; note = 2'-deoxy-2'-fluoroguanosine-3'-phosphate
  modified_base 10: mod_base = OTHER; note = 2'-O-methylguanosine-3'-phosphate
  modified_base 11: mod_base = OTHER; note = 2'-O-methyladenosine-3'-phosphate
  modified_base 12: mod_base = OTHER; note = 2'-O-methyladenosine-3'-phosphate
  modified_base 13: mod_base = OTHER; note = 2'-O-methylguanosine-3'-phosphate
  modified_base 14: mod_base = OTHER; note = 2'-deoxy-2'-fluoroguanosine-3'-phosphate
  modified_base 15: mod_base = OTHER; note = 2'-O-methylcytidine-3'-phosphate
  modified_base 16: mod_base = OTHER; note = 2'-deoxy-2'-fluorocytidine-3'-phosphate
  modified_base 17: mod_base = OTHER; note = 2'-O-methylguanosine-3'-phosphate
  modified_base 18: mod_base = OTHER; note = 2'-O-methylguanosine-3'-phosphate
  modified_base 19: mod_base = OTHER; note = 2'-O-methylguanosine-3'-phosphate
  modified_base 20: mod_base = OTHER; note = 2'-O-methyladenosine-3'-phosphate
  modified_base 21: mod_base = OTHER; note = 2'-O-methylguanosine-3'-phosphorothioate
  modified_base 22: mod_base = OTHER; note = 2'-O-methyladenosine-3'-phosphorothioate
  modified_base 23: mod_base = OTHER; note = 2'-O-methyladenosine
taggcagaggaaggccgggagaa

SEQ ID NO: 554 - RNA, 23 nt, synthetic construct
  source 1..23: mol_type = other RNA
  modified_base 1: mod_base = OTHER; note = 2'-O-methyluridine-3'-phosphorothioate 5'-(E)-Vinylphosphonate
  modified_base 2: mod_base = OTHER; note = 2'-deoxy-2'-fluorocytidine-3'-phosphorothioate
  modified_base 3: mod_base = OTHER; note = 2'-O-methyluridine-3'-phosphate
  modified_base 4: mod_base = OTHER; note = 2'-O-methylguanosine-3'-phosphate
  modified_base 5: mod_base = OTHER; note = 2'-O-methylcytidine-3'-phosphate
  modified_base 6: mod_base = OTHER; note = 2'-deoxy-2'-fluorocytidine-3'-phosphate
  modified_base 7: mod_base = OTHER; note = 2'-O-methyladenosine-3'-phosphate
  modified_base 8: mod_base = OTHER; note = 2'-deoxy-2'-fluoroadenosine-3'-phosphate
  modified_base 9: mod_base = OTHER; note = 2'-deoxy-2'-fluorouridine-3'-phosphate
  modified_base 10: mod_base = OTHER; note = 2'-O-methylcytidine-3'-phosphate
  modified_base 11: mod_base = OTHER; note = 2'-O-methyladenosine-3'-phosphate
  modified_base 12: mod_base = OTHER; note = 2'-O-methylguanosine-3'-phosphate
  modified_base 13: mod_base = OTHER; note = 2'-O-methyladenosine-3'-phosphate
  modified_base 14: mod_base = OTHER; note = 2'-deoxy-2'-fluorouridine-3'-phosphate
  modified_base 15: mod_base = OTHER; note = 2'-O-methylguanosine-3'-phosphate
  modified_base 16: mod_base = OTHER; note = 2'-deoxy-2'-fluorocytidine-3'-phosphate
  modified_base 17: mod_base = OTHER; note = 2'-O-methyladenosine-3'-phosphate
  modified_base 18: mod_base = OTHER; note = 2'-O-methylguanosine-3'-phosphate
  modified_base 19: mod_base = OTHER; note = 2'-O-methyluridine-3'-phosphate
  modified_base 20: mod_base = OTHER; note = 2'-O-methylguanosine-3'-phosphate
  modified_base 21: mod_base = OTHER; note = 2'-O-methylguanosine-3'-phosphorothioate
  modified_base 22: mod_base = OTHER; note = 2'-O-methylguanosine-3'-phosphorothioate
  modified_base 23: mod_base = OTHER; note = 2'-O-methylcytidine
tctgccaatcagatgcagtgggc

SEQ ID NO: 555 - RNA, 23 nt, synthetic construct
  source 1..23: mol_type = other RNA
  modified_base 1: mod_base = OTHER; note = 2'-O-methyluridine-3'-phosphorothioate 5'-(E)-Vinylphosphonate
  modified_base 2: mod_base = OTHER; note = 2'-deoxy-2'-fluorocytidine-3'-phosphorothioate
  modified_base 3: mod_base = OTHER; note = 2'-O-methylcytidine-3'-phosphate
  modified_base 4: mod_base = OTHER; note = 2'-O-methylcytidine-3'-phosphate
  modified_base 5: mod_base = OTHER; note = 2'-O-methyluridine-3'-phosphate
  modified_base 6: mod_base = OTHER; note = 2'-deoxy-2'-fluorocytidine-3'-phosphate
  modified_base 7: mod_base = OTHER; note = 2'-O-methyladenosine-3'-phosphate
  modified_base 8: mod_base = OTHER; note = 2'-deoxy-2'-fluorouridine-3'-phosphate
  modified_base 9: mod_base = OTHER; note = 2'-deoxy-2'-fluoroguanosine-3'-phosphate
  modified_base 10: mod_base = OTHER; note = 2'-O-methylguanosine-3'-phosphate
  modified_base 11: mod_base = OTHER; note = 2'-O-methylguanosine-3'-phosphate
  modified_base 12: mod_base = OTHER; note = 2'-O-methyladenosine-3'-phosphate
  modified_base 13: mod_base = OTHER; note = 2'-O-methyladenosine-3'-phosphate
  modified_base 14: mod_base = OTHER; note = 2'-deoxy-2'-fluoroguanosine-3'-phosphate
  modified_base 15: mod_base = OTHER; note = 2'-O-methyluridine-3'-phosphate
  modified_base 16: mod_base = OTHER; note = 2'-deoxy-2'-fluoroguanosine-3'-phosphate
  modified_base 17: mod_base = OTHER; note = 2'-O-methyladenosine-3'-phosphate
  modified_base 18: mod_base = OTHER; note = 2'-O-methylcytidine-3'-phosphate
  modified_base 19: mod_base = OTHER; note = 2'-O-methyluridine-3'-phosphate
  modified_base 20: mod_base = OTHER; note = 2'-O-methylguanosine-3'-phosphate
  modified_base 21: mod_base = OTHER; note = 2'-O-methylcytidine-3'-phosphorothioate
  modified_base 22: mod_base = OTHER; note = 2'-O-methylcytidine-3'-phosphorothioate
  modified_base 23: mod_base = OTHER; note = 2'-O-methyladenosine
tccctcatgggaagtgactgcca

SEQ ID NO: 556 - RNA, 23 nt, synthetic construct
  source 1..23: mol_type = other RNA
  modified_base 1: mod_base = OTHER; note = 2'-O-methyluridine-3'-phosphorothioate 5'-(E)-Vinylphosphonate
  modified_base 2: mod_base = OTHER; note = 2'-deoxy-2'-fluorouridine-3'-phosphorothioate
  modified_base 3: mod_base = OTHER; note = 2'-O-methyluridine-3'-phosphate
  modified_base 4: mod_base = OTHER; note = 2'-O-methyluridine-3'-phosphate
  modified_base 5: mod_base = OTHER; note = 2'-O-methylcytidine-3'-phosphate
  modified_base 6: mod_base = OTHER; note = 2'-deoxy-2'-fluorocytidine-3'-phosphate
  modified_base 7: mod_base = OTHER; note = 2'-O-methyluridine-3'-phosphate
  modified_base 8: mod_base = OTHER; note = 2'-deoxy-2'-fluorouridine-3'-phosphate
  modified_base 9: mod_base = OTHER; note = 2'-deoxy-2'-fluoroadenosine-3'-phosphate
  modified_base 10: mod_base = OTHER; note = 2'-O-methylguanosine-3'-phosphate
  modified_base 11: mod_base = OTHER; note = 2'-O-methylguanosine-3'-phosphate
  modified_base 12: mod_base = OTHER; note = 2'-O-methylguanosine-3'-phosphate
  modified_base 13: mod_base = OTHER; note = 2'-O-methylcytidine-3'-phosphate
  modified_base 14: mod_base = OTHER; note = 2'-deoxy-2'-fluoroadenosine-3'-phosphate
  modified_base 15: mod_base = OTHER; note = 2'-O-methyladenosine-3'-phosphate
  modified_base 16: mod_base = OTHER; note = 2'-deoxy-2'-fluorocytidine-3'-phosphate
  modified_base 17: mod_base = OTHER; note = 2'-O-methyluridine-3'-phosphate
  modified_base 18: mod_base = OTHER; note = 2'-O-methylguanosine-3'-phosphate
  modified_base 19: mod_base = OTHER; note = 2'-O-methylcytidine-3'-phosphate
  modified_base 20: mod_base = OTHER; note = 2'-O-methyladenosine-3'-phosphate
  modified_base 21: mod_base = OTHER; note = 2'-O-methylguanosine-3'-phosphorothioate
  modified_base 22: mod_base = OTHER; note = 2'-O-methylcytidine-3'-phosphorothioate
  modified_base 23: mod_base = OTHER; note = 2'-O-methylguanosine
ttttccttagggcaactgcagcg

SEQ ID NO: 557 - RNA, 23 nt, synthetic construct
  source 1..23: mol_type = other RNA
  modified_base 8: mod_base = OTHER; note = 5'-methyluridine-3'-phosphate
gggagaatggaggagcacacaga

SEQ ID NO: 558 - RNA, 23 nt, synthetic construct
  source 1..23: mol_type = other RNA
  modified_base 22: mod_base = OTHER; note = 5'-methyluridine-3'-phosphate
gaggagcacacagaggcaggctc

SEQ ID NO: 559 - RNA, 23 nt, synthetic construct
  source 1..23: mol_type = other RNA
  modified_base 9: mod_base = OTHER; note = 5'-methyluridine-3'-phosphate
  modified_base 22: mod_base = OTHER; note = 5'-methyluridine-3'-phosphate
aggcaggctcggcaccagagatg

SEQ ID NO: 560 - RNA, 23 nt, synthetic construct
  source 1..23: mol_type = other RNA
  modified_base 15: mod_base = OTHER; note = 5'-methyluridine-3'-phosphate
  modified_base 18: mod_base = OTHER; note = 5'-methyluridine-3'-phosphate
  modified_base 19: mod_base = OTHER; note = 5'-methyluridine-3'-phosphate
ggcccagaaggccctgattgaca

SEQ ID NO: 561 - RNA, 23 nt, synthetic construct
  source 1..23: mol_type = other RNA
  modified_base 6: mod_base = OTHER; note = 5'-methyluridine-3'-phosphate
  modified_base 9: mod_base = OTHER; note = 5'-methyluridine-3'-phosphate
  modified_base 10: mod_base = OTHER; note = 5'-methyluridine-3'-phosphate
  modified_base 16: mod_base = OTHER; note = 5'-methyluridine-3'-phosphate
  modified_base 19: mod_base = OTHER; note = 5'-methyluridine-3'-phosphate
  modified_base 22: mod_base = OTHER; note = 5'-methyluridine-3'-phosphate
ggccctgattgacaatcctgctg

SEQ ID NO: 562 - RNA, 23 nt, synthetic construct
  source 1..23: mol_type = other RNA
  modified_base 1: mod_base = OTHER; note = 5'-methyluridine-3'-phosphate
  modified_base 7: mod_base = OTHER; note = 5'-methyluridine-3'-phosphate
  modified_base 10: mod_base = OTHER; note = 5'-methyluridine-3'-phosphate
  modified_base 13: mod_base = OTHER; note = 5'-methyluridine-3'-phosphate
  modified_base 18: mod_base = OTHER; note = 5'-methyluridine-3'-phosphate
  modified_base 21: mod_base = OTHER; note = 5'-methyluridine-3'-phosphate
tgacaatcctgctgacatcctag

SEQ ID NO: 563 - RNA, 23 nt, synthetic construct
  source 1..23: mol_type = other RNA
  modified_base 3: mod_base = OTHER; note = 5'-methyluridine-3'-phosphate
  modified_base 8: mod_base = OTHER; note = 5'-methyluridine-3'-phosphate
  modified_base 11: mod_base = OTHER; note = 5'-methyluridine-3'-phosphate
  modified_base 14: mod_base = OTHER; note = 5'-methyluridine-3'-phosphate
  modified_base 17: mod_base = OTHER; note = 5'-methyluridine-3'-phosphate
  modified_base 18: mod_base = OTHER; note = 5'-methyluridine-3'-phosphate
  modified_base 21: mod_base = OTHER; note = 5'-methyluridine-3'-phosphate
gctgacatcctagtcattgctgc

SEQ ID NO: 564 - RNA, 23 nt, synthetic construct
  source 1..23: mol_type = other RNA
  modified_base 1: mod_base = OTHER; note = 5'-methyluridine-3'-phosphate
  modified_base 4: mod_base = OTHER; note = 5'-methyluridine-3'-phosphate
  modified_base 7: mod_base = OTHER; note = 5'-methyluridine-3'-phosphate
  modified_base 8: mod_base = OTHER; note = 5'-methyluridine-3'-phosphate
  modified_base 11: mod_base = OTHER; note = 5'-methyluridine-3'-phosphate
  modified_base 15: mod_base = OTHER; note = 5'-methyluridine-3'-phosphate
  modified_base 17: mod_base = OTHER; note = 5'-methyluridine-3'-phosphate
  modified_base 18: mod_base = OTHER; note = 5'-methyluridine-3'-phosphate
  modified_base 19: mod_base = OTHER; note = 5'-methyluridine-3'-phosphate
  modified_base 22: mod_base = OTHER; note = 5'-methyluridine-3'-phosphate
tagtcattgctgcatatttcctg

SEQ ID NO: 565 - RNA, 23 nt, synthetic construct
  source 1..23: mol_type = other RNA
  modified_base 2: mod_base = OTHER; note = 5'-methyluridine-3'-phosphate
  modified_base 6: mod_base = OTHER; note = 5'-methyluridine-3'-phosphate
  modified_base 8: mod_base = OTHER; note = 5'-methyluridine-3'-phosphate
  modified_base 9: mod_base = OTHER; note = 5'-methyluridine-3'-phosphate
  modified_base 10: mod_base = OTHER; note = 5'-methyluridine-3'-phosphate
  modified_base 13: mod_base = OTHER; note = 5'-methyluridine-3'-phosphate
  modified_base 16: mod_base = OTHER; note = 5'-methyluridine-3'-phosphate
  modified_base 19: mod_base = OTHER; note = 5'-methyluridine-3'-phosphate
  modified_base 22: mod_base = OTHER; note = 5'-methyluridine-3'-phosphate
  modified_base 23: mod_base = OTHER; note = 5'-methyluridine
ctgcatatttcctgctggtcatt

SEQ ID NO: 566 - RNA, 23 nt, synthetic construct
  source 1..23: mol_type = other RNA
  modified_base 1: mod_base = OTHER; note = 5'-methyluridine-3'-phosphate
  modified_base 4: mod_base = OTHER; note = 5'-methyluridine-3'-phosphate
  modified_base 7: mod_base = OTHER; note = 5'-methyluridine-3'-phosphate
  modified_base 10: mod_base = OTHER; note = 5'-methyluridine-3'-phosphate
  modified_base 13: mod_base = OTHER; note = 5'-methyluridine-3'-phosphate
  modified_base 14: mod_base = OTHER; note = 5'-methyluridine-3'-phosphate
  modified_base 19: mod_base = OTHER; note = 5'-methyluridine-3'-phosphate
  modified_base 20: mod_base = OTHER; note = 5'-methyluridine-3'-phosphate
tcctgctggtcattggcgttggc

SEQ ID NO: 567 - RNA, 23 nt, synthetic construct
  source 1..23: mol_type = other RNA
  modified_base 2: mod_base = OTHER; note = 5'-methyluridine-3'-phosphate
  modified_base 3: mod_base = OTHER; note = 5'-methyluridine-3'-phosphate
  modified_base 8: mod_base = OTHER; note = 5'-methyluridine-3'-phosphate
  modified_base 9: mod_base = OTHER; note = 5'-methyluridine-3'-phosphate
  modified_base 13: mod_base = OTHER; note = 5'-methyluridine-3'-phosphate
  modified_base 14: mod_base = OTHER; note = 5'-methyluridine-3'-phosphate
  modified_base 16: mod_base = OTHER; note = 5'-methyluridine-3'-phosphate
  modified_base 19: mod_base = OTHER; note = 5'-methyluridine-3'-phosphate
  modified_base 23: mod_base = OTHER; note = 5'-methyluridine
attggcgttggcttgtggtccat

SEQ ID NO: 568 - RNA, 23 nt, synthetic construct
  source 1..23: mol_type = other RNA
  modified_base 1: mod_base = OTHER; note = 5'-methyluridine-3'-phosphate
  modified_base 4: mod_base = OTHER; note = 5'-methyluridine-3'-phosphate
  modified_base 8: mod_base = OTHER; note = 5'-methyluridine-3'-phosphate
  modified_base 10: mod_base = OTHER; note = 5'-methyluridine-3'-phosphate
tggtccatgtgcagaaccaacag

SEQ ID NO: 569 - RNA, 23 nt, synthetic construct
  source 1..23: mol_type = other RNA
  modified_base 1: mod_base = OTHER; note = 5'-methyluridine-3'-phosphate
  modified_base 21: mod_base = OTHER; note = 5'-methyluridine-3'-phosphate
  modified_base 23: mod_base = OTHER; note = 5'-methyluridine
tgcagaaccaacagaggcactgt

SEQ ID NO: 570 - RNA, 23 nt, synthetic construct
  source 1..23: mol_type = other RNA
  modified_base 11: mod_base = OTHER; note = 5'-methyluridine-3'-phosphate
  modified_base 13: mod_base = OTHER; note = 5'-methyluridine-3'-phosphate
  modified_base 21: mod_base = OTHER; note = 5'-methyluridine-3'-phosphate
acagaggcactgtgggcggctac

SEQ ID NO: 571 - RNA, 23 nt, synthetic construct
  source 1..23: mol_type = other RNA
  modified_base 1: mod_base = OTHER; note = 5'-methyluridine-3'-phosphate
  modified_base 3: mod_base = OTHER; note = 5'-methyluridine-3'-phosphate
  modified_base 11: mod_base = OTHER; note = 5'-methyluridine-3'-phosphate
  modified_base 14: mod_base = OTHER; note = 5'-methyluridine-3'-phosphate
  modified_base 15: mod_base = OTHER; note = 5'-methyluridine-3'-phosphate
  modified_base 18: mod_base = OTHER; note = 5'-methyluridine-3'-phosphate
tgtgggcggctacttcctggcag

SEQ ID NO: 572 - RNA, 23 nt, synthetic construct
  source 1..23: mol_type = other RNA
  modified_base 1: mod_base = OTHER; note = 5'-methyluridine-3'-phosphate
  modified_base 4: mod_base = OTHER; note = 5'-methyluridine-3'-phosphate
  modified_base 5: mod_base = OTHER; note = 5'-methyluridine-3'-phosphate
  modified_base 8: mod_base = OTHER; note = 5'-methyluridine-3'-phosphate
  modified_base 23: mod_base = OTHER; note = 5'-methyluridine
tacttcctggcaggacgcagcat

SEQ ID NO: 573 - RNA, 23 nt, synthetic construct
  source 1..23: mol_type = other RNA
  modified_base 14: mod_base = OTHER; note = 5'-methyluridine-3'-phosphate
  modified_base 17: mod_base = OTHER; note = 5'-methyluridine-3'-phosphate
  modified_base 19: mod_base = OTHER; note = 5'-methyluridine-3'-phosphate
  modified_base 22: mod_base = OTHER; note = 5'-methyluridine-3'-phosphate
gcaggacgcagcatggtgtggtg

SEQ ID NO: 574 - RNA, 23 nt, synthetic construct
  source 1..23: mol_type = other RNA
  modified_base 5: mod_base = OTHER; note = 5'-methyluridine-3'-phosphate
  modified_base 7: mod_base = OTHER; note = 5'-methyluridine-3'-phosphate
  modified_base 9: mod_base = OTHER; note = 5'-methyluridine-3'-phosphate
  modified_base 11: mod_base = OTHER; note = 5'-methyluridine-3'-phosphate
  modified_base 12: mod_base = OTHER; note = 5'-methyluridine-3'-phosphate
ggcctctctcttcgccagcaaca

SEQ ID NO: 575 - RNA, 23 nt, synthetic construct
  source 1..23: mol_type = other RNA
  modified_base 2: mod_base = OTHER; note = 5'-methyluridine-3'-phosphate
  modified_base 3: mod_base = OTHER; note = 5'-methyluridine-3'-phosphate
  modified_base 15: mod_base = OTHER; note = 5'-methyluridine-3'-phosphate
  modified_base 22: mod_base = OTHER; note = 5'-methyluridine-3'-phosphate
cttcgccagcaacatcggcagtg

SEQ ID NO: 576 - RNA, 23 nt, synthetic construct
  source 1..23: mol_type = other RNA
  modified_base 5: mod_base = OTHER; note = 5'-methyluridine-3'-phosphate
  modified_base 12: mod_base = OTHER; note = 5'-methyluridine-3'-phosphate
  modified_base 19: mod_base = OTHER; note = 5'-methyluridine-3'-phosphate
  modified_base 20: mod_base = OTHER; note = 5'-methyluridine-3'-phosphate
  modified_base 21: mod_base = OTHER; note = 5'-methyluridine-3'-phosphate
  modified_base 23: mod_base = OTHER; note = 5'-methyluridine
aacatcggcagtggccactttgt

SEQ ID NO: 577 - RNA, 23 nt, synthetic construct
  source 1..23: mol_type = other RNA
  modified_base 3: mod_base = OTHER; note = 5'-methyluridine-3'-phosphate
  modified_base 10: mod_base = OTHER; note = 5'-methyluridine-3'-phosphate
  modified_base 11: mod_base = OTHER; note = 5'-methyluridine-3'-phosphate
  modified_base 12: mod_base = OTHER; note = 5'-methyluridine-3'-phosphate
  modified_base 14: mod_base = OTHER; note = 5'-methyluridine-3'-phosphate
  modified_base 20: mod_base = OTHER; note = 5'-methyluridine-3'-phosphate
agtggccactttgtgggcctggc

SEQ ID NO: 578 - RNA, 23 nt, synthetic construct
  source 1..23: mol_type = other RNA
  modified_base 4: mod_base = OTHER; note = 5'-methyluridine-3'-phosphate
  modified_base 10: mod_base = OTHER; note = 5'-methyluridine-3'-phosphate
  modified_base 14: mod_base = OTHER; note = 5'-methyluridine-3'-phosphate
  modified_base 15: mod_base = OTHER; note = 5'-methyluridine-3'-phosphate
  modified_base 19: mod_base = OTHER; note = 5'-methyluridine-3'-phosphate
  modified_base 21: mod_base = OTHER; note = 5'-methyluridine-3'-phosphate
  modified_base 22: mod_base = OTHER; note = 5'-methyluridine-3'-phosphate
cgctgcaagtggcttggctgttg

SEQ ID NO: 579 - RNA, 23 nt, synthetic construct
  source 1..23: mol_type = other RNA
  modified_base 3: mod_base = OTHER; note = 5'-methyluridine-3'-phosphate
  modified_base 4: mod_base = OTHER; note = 5'-methyluridine-3'-phosphate
  modified_base 8: mod_base = OTHER; note = 5'-methyluridine-3'-phosphate
  modified_base 10: mod_base = OTHER; note = 5'-methyluridine-3'-phosphate
  modified_base 11: mod_base = OTHER; note = 5'-methyluridine-3'-phosphate
  modified_base 14: mod_base = OTHER; note = 5'-methyluridine-3'-phosphate
  modified_base 18: mod_base = OTHER; note = 5'-methyluridine-3'-phosphate
  modified_base 19: mod_base = OTHER; note = 5'-methyluridine-3'-phosphate
gcttggctgttgctggattcgag

SEQ ID NO: 580 - RNA, 23 nt, synthetic construct
  source 1..23: mol_type = other RNA
  modified_base 1: mod_base = OTHER; note = 5'-methyluridine-3'-phosphate
  modified_base 2: mod_base = OTHER; note = 5'-methyluridine-3'-phosphate
  modified_base 7: mod_base = OTHER; note = 5'-methyluridine-3'-phosphate
  modified_base 12: mod_base = OTHER; note = 5'-methyluridine-3'-phosphate
  modified_base 17: mod_base = OTHER; note = 5'-methyluridine-3'-phosphate
  modified_base 19: mod_base = OTHER; note = 5'-methyluridine-3'-phosphate
  modified_base 20: mod_base = OTHER; note = 5'-methyluridine-3'-phosphate
  modified_base 23: mod_base = OTHER; note = 5'-methyluridine
ttcgagtggaatgcgctcttcgt

SEQ ID NO: 581 - RNA, 23 nt, synthetic construct
  source 1..23: mol_type = other RNA
  modified_base 2: mod_base = OTHER; note = 5'-methyluridine-3'-phosphate
  modified_base 7: mod_base = OTHER; note = 5'-methyluridine-3'-phosphate
  modified_base 9: mod_base = OTHER; note = 5'-methyluridine-3'-phosphate
  modified_base 10: mod_base = OTHER; note = 5'-methyluridine-3'-phosphate
  modified_base 13: mod_base = OTHER; note = 5'-methyluridine-3'-phosphate
  modified_base 16: mod_base = OTHER; note = 5'-methyluridine-3'-phosphate
  modified_base 19: mod_base = OTHER; note = 5'-methyluridine-3'-phosphate
  modified_base 22: mod_base = OTHER; note = 5'-methyluridine-3'-phosphate
atgcgctcttcgtggtgctgcta

SEQ ID NO: 582 - RNA, 23 nt, synthetic construct
  source 1..23: mol_type = other RNA
  modified_base 1: mod_base = OTHER; note = 5'-methyluridine-3'-phosphate
  modified_base 4: mod_base = OTHER; note = 5'-methyluridine-3'-phosphate
  modified_base 7: mod_base = OTHER; note = 5'-methyluridine-3'-phosphate
  modified_base 10: mod_base = OTHER; note = 5'-methyluridine-3'-phosphate
  modified_base 13: mod_base = OTHER; note = 5'-methyluridine-3'-phosphate
  modified_base 16: mod_base = OTHER; note = 5'-methyluridine-3'-phosphate
  modified_base 21: mod_base = OTHER; note = 5'-methyluridine-3'-phosphate
tcgtggtgctgctactgggctgg

SEQ ID NO: 583 - RNA, 23 nt, synthetic construct
  source 1..23: mol_type = other RNA
  modified_base 1: mod_base = OTHER; note = 5'-methyluridine-3'-phosphate
  modified_base 4: mod_base = OTHER; note = 5'-methyluridine-3'-phosphate
  modified_base 7: mod_base = OTHER; note = 5'-methyluridine-3'-phosphate
  modified_base 12: mod_base = OTHER; note = 5'-methyluridine-3'-phosphate
  modified_base 16: mod_base = OTHER; note = 5'-methyluridine-3'-phosphate
  modified_base 18: mod_base = OTHER; note = 5'-methyluridine-3'-phosphate
  modified_base 19: mod_base = OTHER; note = 5'-methyluridine-3'-phosphate
  modified_base 20: mod_base = OTHER; note = 5'-methyluridine-3'-phosphate
tgctactgggctggctgtttgca

SEQ ID NO: 584 - RNA, 23 nt, synthetic construct
  source 1..23: mol_type = other RNA
  modified_base 3: mod_base = OTHER; note = 5'-methyluridine-3'-phosphate
  modified_base 7: mod_base = OTHER; note = 5'-methyluridine-3'-phosphate
  modified_base 9: mod_base = OTHER; note = 5'-methyluridine-3'-phosphate
  modified_base 10: mod_base = OTHER; note = 5'-methyluridine-3'-phosphate
  modified_base 11: mod_base = OTHER; note = 5'-methyluridine-3'-phosphate
  modified_base 19: mod_base = OTHER; note = 5'-methyluridine-3'-phosphate
  modified_base 21: mod_base = OTHER; note = 5'-methyluridine-3'-phosphate
gctggctgtttgcacccgtgtac

SEQ ID NO: 585 - RNA, 23 nt, synthetic construct
  source 1..23: mol_type = other RNA
  modified_base 1: mod_base = OTHER; note = 5'-methyluridine-3'-phosphate
  modified_base 9: mod_base = OTHER; note = 5'-methyluridine-3'-phosphate
  modified_base 11: mod_base = OTHER; note = 5'-methyluridine-3'-phosphate
  modified_base 15: mod_base = OTHER; note = 5'-methyluridine-3'-phosphate
tgcacccgtgtacctgacagcgg

SEQ ID NO: 586 - RNA, 23 nt, synthetic construct
  source 1..23: mol_type = other RNA
  modified_base 4: mod_base = OTHER; note = 5'-methyluridine-3'-phosphate
  modified_base 7: mod_base = OTHER; note = 5'-methyluridine-3'-phosphate
  modified_base 13: mod_base = OTHER; note = 5'-methyluridine-3'-phosphate
  modified_base 21: mod_base = OTHER; note = 5'-methyluridine-3'-phosphate
gggtcatcacgatgccacagtac

SEQ ID NO: 587 - RNA, 23 nt, synthetic construct
  source 1..23: mol_type = other RNA
  modified_base 4: mod_base = OTHER; note = 5'-methyluridine-3'-phosphate
  modified_base 12: mod_base = OTHER; note = 5'-methyluridine-3'-phosphate
  modified_base 16: mod_base = OTHER; note = 5'-methyluridine-3'-phosphate
cgatgccacagtacctgcgcaag

SEQ ID NO: 588 - RNA, 23 nt, synthetic construct
  source 1..23: mol_type = other RNA
  modified_base 3: mod_base = OTHER; note = 5'-methyluridine-3'-phosphate
  modified_base 7: mod_base = OTHER; note = 5'-methyluridine-3'-phosphate
  modified_base 18: mod_base = OTHER; note = 5'-methyluridine-3'-phosphate
  modified_base 19: mod_base = OTHER; note = 5'-methyluridine-3'-phosphate
agtacctgcgcaagcgcttcggc

SEQ ID NO: 589 - RNA, 23 nt, synthetic construct
  source 1..23: mol_type = other RNA
  modified_base 5: mod_base = OTHER; note = 5'-methyluridine-3'-phosphate
  modified_base 7: mod_base = OTHER; note = 5'-methyluridine-3'-phosphate
  modified_base 11: mod_base = OTHER; note = 5'-methyluridine-3'-phosphate
  modified_base 13: mod_base = OTHER; note = 5'-methyluridine-3'-phosphate
  modified_base 15: mod_base = OTHER; note = 5'-methyluridine-3'-phosphate
  modified_base 17: mod_base = OTHER; note = 5'-methyluridine-3'-phosphate
  modified_base 20: mod_base = OTHER; note = 5'-methyluridine-3'-phosphate
  modified_base 22: mod_base = OTHER; note = 5'-methyluridine-3'-phosphate
cgcctctacctgtctgtgctctc

SEQ ID NO: 590 - RNA, 23 nt, synthetic construct
  source 1..23: mol_type = other RNA
  modified_base 1: mod_base = OTHER; note = 5'-methyluridine-3'-phosphate
  modified_base 3: mod_base = OTHER; note = 5'-methyluridine-3'-phosphate
  modified_base 5: mod_base = OTHER; note = 5'-methyluridine-3'-phosphate
  modified_base 8: mod_base = OTHER; note = 5'-methyluridine-3'-phosphate
  modified_base 10: mod_base = OTHER; note = 5'-methyluridine-3'-phosphate
  modified_base 14: mod_base = OTHER; note = 5'-methyluridine-3'-phosphate
  modified_base 15: mod_base = OTHER; note = 5'-methyluridine-3'-phosphate
  modified_base 16: mod_base = OTHER; note = 5'-methyluridine-3'-phosphate
  modified_base 17: mod_base = OTHER; note = 5'-methyluridine-3'-phosphate
  modified_base 20: mod_base = OTHER; note = 5'-methyluridine-3'-phosphate
  modified_base 22: mod_base = OTHER; note = 5'-methyluridine-3'-phosphate
tctgtgctctcccttttcctgta

SEQ ID NO: 591 - RNA, 23 nt, synthetic construct
  source 1..23: mol_type = other RNA
  modified_base 1: mod_base = OTHER; note = 5'-methyluridine-3'-phosphate
  modified_base 5: mod_base = OTHER; note = 5'-methyluridine-3'-phosphate
  modified_base 6: mod_base = OTHER; note = 5'-methyluridine-3'-phosphate
  modified_base 7: mod_base = OTHER; note = 5'-methyluridine-3'-phosphate
  modified_base 8: mod_base = OTHER; note = 5'-methyluridine-3'-phosphate
  modified_base 11: mod_base = OTHER; note = 5'-methyluridine-3'-phosphate
  modified_base 13: mod_base = OTHER; note = 5'-methyluridine-3'-phosphate
  modified_base 17: mod_base = OTHER; note = 5'-methyluridine-3'-phosphate
  modified_base 19: mod_base = OTHER; note = 5'-methyluridine-3'-phosphate
  modified_base 20: mod_base = OTHER; note = 5'-methyluridine-3'-phosphate
tcccttttcctgtacatcttcac

SEQ ID NO: 592 - RNA, 23 nt, synthetic construct
  source 1..23: mol_type = other RNA
  modified_base 2: mod_base = OTHER; note = 5'-methyluridine-3'-phosphate
  modified_base 4: mod_base = OTHER; note = 5'-methyluridine-3'-phosphate
  modified_base 8: mod_base = OTHER; note = 5'-methyluridine-3'-phosphate
  modified_base 10: mod_base = OTHER; note = 5'-methyluridine-3'-phosphate
  modified_base 11: mod_base = OTHER; note = 5'-methyluridine-3'-phosphate
  modified_base 20: mod_base = OTHER; note = 5'-methyluridine-3'-phosphate
  modified_base 22: mod_base = OTHER; note = 5'-methyluridine-3'-phosphate
ctgtacatcttcaccaagatctc

SEQ ID NO: 593 - RNA, 23 nt, synthetic construct
  source 1..23: mol_type = other RNA
  modified_base 7: mod_base = OTHER; note = 5'-methyluridine-3'-phosphate
  modified_base 9: mod_base = OTHER; note = 5'-methyluridine-3'-phosphate
  modified_base 13: mod_base = OTHER; note = 5'-methyluridine-3'-phosphate
  modified_base 19: mod_base = OTHER; note = 5'-methyluridine-3'-phosphate
  modified_base 21: mod_base = OTHER; note = 5'-methyluridine-3'-phosphate
  modified_base 22: mod_base = OTHER; note = 5'-methyluridine-3'-phosphate
ccaagatctcagtggacatgttc

SEQ ID NO: 594 - RNA, 23 nt, synthetic construct
  source 1..23: mol_type = other RNA
  modified_base 3: mod_base = OTHER; note = 5'-methyluridine-3'-phosphate
  modified_base 9: mod_base = OTHER; note = 5'-methyluridine-3'-phosphate
  modified_base 11: mod_base = OTHER; note = 5'-methyluridine-3'-phosphate
  modified_base 12: mod_base = OTHER; note = 5'-methyluridine-3'-phosphate
  modified_base 14: mod_base = OTHER; note = 5'-methyluridine-3'-phosphate
  modified_base 22: mod_base = OTHER; note = 5'-methyluridine-3'-phosphate
agtggacatgttctccggagctg

SEQ ID NO: 595 - RNA, 23 nt, synthetic construct
  source 1..23: mol_type = other RNA
  modified_base 2: mod_base = OTHER; note = 5'-methyluridine-3'-phosphate
  modified_base 10: mod_base = OTHER; note = 5'-methyluridine-3'-phosphate
  modified_base 12: mod_base = OTHER; note = 5'-methyluridine-3'-phosphate
  modified_base 14: mod_base = OTHER; note = 5'-methyluridine-3'-phosphate
  modified_base 15: mod_base = OTHER; note = 5'-methyluridine-3'-phosphate
  modified_base 18: mod_base = OTHER; note = 5'-methyluridine-3'-phosphate
ctccggagctgtattcatccagc

SEQ ID NO: 596 - RNA, 23 nt, synthetic construct
  source 1..23: mol_type = other RNA
  modified_base 1: mod_base = OTHER; note = 5'-methyluridine-3'-phosphate
  modified_base 4: mod_base = OTHER; note = 5'-methyluridine-3'-phosphate
  modified_base 14: mod_base = OTHER; note = 5'-methyluridine-3'-phosphate
  modified_base 16: mod_base = OTHER; note = 5'-methyluridine-3'-phosphate
  modified_base 21: mod_base = OTHER; note = 5'-methyluridine-3'-phosphate
tcatccagcaggctctgggctgg

SEQ ID NO: 597 - RNA, 23 nt, synthetic construct
  source 1..23: mol_type = other RNA
  modified_base 2: mod_base = OTHER; note = 5'-methyluridine-3'-phosphate
  modified_base 7: mod_base = OTHER; note = 5'-methyluridine-3'-phosphate
  modified_base 14: mod_base = OTHER; note = 5'-methyluridine-3'-phosphate
  modified_base 16: mod_base = OTHER; note = 5'-methyluridine-3'-phosphate
  modified_base 18: mod_base = OTHER; note = 5'-methyluridine-3'-phosphate
  modified_base 22: mod_base = OTHER; note = 5'-methyluridine-3'-phosphate
ctgggctggaacatctatgcctc

SEQ ID NO: 598 - RNA, 23 nt, synthetic construct
  source 1..23: mol_type = other RNA
  modified_base 1: mod_base = OTHER; note = 5'-methyluridine-3'-phosphate
  modified_base 5: mod_base = OTHER; note = 5'-methyluridine-3'-phosphate
  modified_base 9: mod_base = OTHER; note = 5'-methyluridine-3'-phosphate
  modified_base 12: mod_base = OTHER; note = 5'-methyluridine-3'-phosphate
  modified_base 18: mod_base = OTHER; note = 5'-methyluridine-3'-phosphate
  modified_base 19: mod_base = OTHER; note = 5'-methyluridine-3'-phosphate
  modified_base 21: mod_base = OTHER; note = 5'-methyluridine-3'-phosphate
tgcctccgtcatcgcgcttctgg

SEQ ID NO: 599 - RNA, 23 nt, synthetic construct
  source 1..23: mol_type = other RNA
  modified_base 2: mod_base = OTHER; note = 5'-methyluridine-3'-phosphate
  modified_base 8: mod_base = OTHER; note = 5'-methyluridine-3'-phosphate
  modified_base 9: mod_base = OTHER; note = 5'-methyluridine-3'-phosphate
  modified_base 11: mod_base = OTHER; note = 5'-methyluridine-3'-phosphate
  modified_base 17: mod_base = OTHER; note = 5'-methyluridine-3'-phosphate
  modified_base 23: mod_base = OTHER; note = 5'-methyluridine
atcgcgcttctgggcatcaccat

SEQ ID NO: 600 - RNA, 23 nt, synthetic construct
  source 1..23: mol_type = other RNA
  modified_base 2: mod_base = OTHER; note = 5'-methyluridine-3'-phosphate
  modified_base 8: mod_base = OTHER; note = 5'-methyluridine-3'-phosphate
  modified_base 14: mod_base = OTHER; note = 5'-methyluridine-3'-phosphate
  modified_base 17: mod_base = OTHER; note = 5'-methyluridine-3'-phosphate
  modified_base 18: mod_base = OTHER; note = 5'-methyluridine-3'-phosphate
  modified_base 19: mod_base = OTHER; note = 5'-methyluridine-3'-phosphate
ctgggcatcaccatgatttacac

SEQ ID NO: 601 - RNA, 23 nt, synthetic construct
  source 1..23: mol_type = other RNA
  modified_base 5: mod_base = OTHER; note = 5'-methyluridine-3'-phosphate
  modified_base 8: mod_base = OTHER; note = 5'-methyluridine-3'-phosphate
  modified_base 9: mod_base = OTHER; note = 5'-methyluridine-3'-phosphate
  modified_base 10: mod_base = OTHER; note = 5'-methyluridine-3'-phosphate
  modified_base 17: mod_base = OTHER; note = 5'-methyluridine-3'-phosphate
accatgatttacacggtgacagg

SEQ ID NO: 602 - RNA, 23 nt, synthetic construct
  source 1..23: mol_type = other RNA
  modified_base 1: mod_base = OTHER; note = 5'-methyluridine-3'-phosphate
  modified_base 8: mod_base = OTHER; note = 5'-methyluridine-3'-phosphate
  modified_base 20: mod_base = OTHER; note = 5'-methyluridine-3'-phosphate
tacacggtgacaggagggctggc

SEQ ID NO: 603 - RNA, 23 nt, synthetic construct
  source 1..23: mol_type = other RNA
  modified_base 8: mod_base = OTHER; note = 5'-methyluridine-3'-phosphate
  modified_base 11: mod_base = OTHER; note = 5'-methyluridine-3'-phosphate
  modified_base 13: mod_base = OTHER; note = 5'-methyluridine-3'-phosphate
gccgcgctgatgtacacggacac

SEQ ID NO: 604 - RNA, 23 nt, synthetic construct
  source 1..23: mol_type = other RNA
  modified_base 13: mod_base = OTHER; note = 5'-methyluridine-3'-phosphate
  modified_base 21: mod_base = OTHER; note = 5'-methyluridine-3'-phosphate
  modified_base 22: mod_base = OTHER; note = 5'-methyluridine-3'-phosphate
acacggacacggtacagaccttc

SEQ ID NO: 605 - RNA, 23 nt, synthetic construct
  source 1..23: mol_type = other RNA
  modified_base 4: mod_base = OTHER; note = 5'-methyluridine-3'-phosphate
  modified_base 12: mod_base = OTHER; note = 5'-methyluridine-3'-phosphate
  modified_base 13: mod_base = OTHER; note = 5'-methyluridine-3'-phosphate
  modified_base 16: mod_base = OTHER; note = 5'-methyluridine-3'-phosphate
  modified_base 19: mod_base = OTHER; note = 5'-methyluridine-3'-phosphate
  modified_base 20: mod_base = OTHER; note = 5'-methyluridine-3'-phosphate
  modified_base 22: mod_base = OTHER; note = 5'-methyluridine-3'-phosphate
cggtacagaccttcgtcattctg

SEQ ID NO: 606 - RNA, 23 nt, synthetic construct
  source 1..23: mol_type = other RNA
  modified_base 6: mod_base = OTHER; note = 5'-methyluridine-3'-phosphate
  modified_base 10: mod_base = OTHER; note = 5'-methyluridine-3'-phosphate
  modified_base 13: mod_base = OTHER; note = 5'-methyluridine-3'-phosphate
  modified_base 16: mod_base = OTHER; note = 5'-methyluridine-3'-phosphate
  modified_base 20: mod_base = OTHER; note = 5'-methyluridine-3'-phosphate
  modified_base 21: mod_base = OTHER; note = 5'-methyluridine-3'-phosphate
gcgcctgcatcctcatgggttac

SEQ ID NO: 607 - RNA, 23 nt, synthetic construct
  source 1..23: mol_type = other RNA
  modified_base 1: mod_base = OTHER; note = 5'-methyluridine-3'-phosphate
  modified_base 4: mod_base = OTHER; note = 5'-methyluridine-3'-phosphate
  modified_base 7: mod_base = OTHER; note = 5'-methyluridine-3'-phosphate
  modified_base 11: mod_base = OTHER; note = 5'-methyluridine-3'-phosphate
  modified_base 12: mod_base = OTHER; note = 5'-methyluridine-3'-phosphate
  modified_base 18: mod_base = OTHER; note = 5'-methyluridine-3'-phosphate
  modified_base 19: mod_base = OTHER; note = 5'-methyluridine-3'-phosphate
tcctcatgggttacgccttccac

SEQ ID NO: 608 - RNA, 23 nt, synthetic construct
  source 1..23: mol_type = other RNA
  modified_base 2: mod_base = OTHER; note = 5'-methyluridine-3'-phosphate
  modified_base 3: mod_base = OTHER; note = 5'-methyluridine-3'-phosphate
  modified_base 9: mod_base = OTHER; note = 5'-methyluridine-3'-phosphate
  modified_base 10: mod_base = OTHER; note = 5'-methyluridine-3'-phosphate
  modified_base 19: mod_base = OTHER; note = 5'-methyluridine-3'-phosphate
gttacgccttccacgaggtgggc

SEQ ID NO: 609 - RNA, 23 nt, synthetic construct
  source 1..23: mol_type = other RNA
  modified_base 1: mod_base = OTHER; note = 5'-methyluridine-3'-phosphate
  modified_base 10: mod_base = OTHER; note = 5'-methyluridine-3'-phosphate
  modified_base 18: mod_base = OTHER; note = 5'-methyluridine-3'-phosphate
  modified_base 20: mod_base = OTHER; note = 5'-methyluridine-3'-phosphate
  modified_base 21: mod_base = OTHER; note = 5'-methyluridine-3'-phosphate
tccacgaggtgggcgggtattcg

SEQ ID NO: 610 - RNA, 23 nt, synthetic construct
  source 1..23: mol_type = other RNA
  modified_base 7: mod_base = OTHER; note = 5'-methyluridine-3'-phosphate
  modified_base 9: mod_base = OTHER; note = 5'-methyluridine-3'-phosphate
  modified_base 10: mod_base = OTHER; note = 5'-methyluridine-3'-phosphate
  modified_base 15: mod_base = OTHER; note = 5'-methyluridine-3'-phosphate
  modified_base 17: mod_base = OTHER; note = 5'-methyluridine-3'-phosphate
  modified_base 19: mod_base = OTHER; note = 5'-methyluridine-3'-phosphate
  modified_base 20: mod_base = OTHER; note = 5'-methyluridine-3'-phosphate
ggcgggtattcgggtctcttcga

SEQ ID NO: 611 - RNA, 23 nt, synthetic construct
  source 1..23: mol_type = other RNA
  modified_base 5: mod_base = OTHER; note = 5'-methyluridine-3'-phosphate
  modified_base 7: mod_base = OTHER; note = 5'-methyluridine-3'-phosphate
  modified_base 9: mod_base = OTHER; note = 5'-methyluridine-3'-phosphate
  modified_base 10: mod_base = OTHER; note = 5'-methyluridine-3'-phosphate
  modified_base 18: mod_base = OTHER; note = 5'-methyluridine-3'-phosphate
  modified_base 22: mod_base = OTHER; note = 5'-methyluridine-3'-phosphate
cgggtctcttcgacaaatacctg

SEQ ID NO: 612 - RNA, 23 nt, synthetic construct
  source 1..23: mol_type = other RNA
  modified_base 1: mod_base = OTHER; note = 5'-methyluridine-3'-phosphate
  modified_base 5: mod_base = OTHER; note = 5'-methyluridine-3'-phosphate
  modified_base 18: mod_base = OTHER; note = 5'-methyluridine-3'-phosphate
  modified_base 19: mod_base = OTHER; note = 5'-methyluridine-3'-phosphate
  modified_base 23: mod_base = OTHER; note = 5'-methyluridine
tacctgggagcagcgacttcgct

SEQ ID NO: 613 - RNA, 23 nt, synthetic construct
  source 1..23: mol_type = other RNA
  modified_base 9: mod_base = OTHER; note = 5'-methyluridine-3'-phosphate
  modified_base 10: mod_base = OTHER; note = 5'-methyluridine-3'-phosphate
  modified_base 14: mod_base = OTHER; note = 5'-methyluridine-3'-phosphate
  modified_base 20: mod_base = OTHER; note = 5'-methyluridine-3'-phosphate
  modified_base 22: mod_base = OTHER; note = 5'-methyluridine-3'-phosphate
gcagcgacttcgctgacggtgtc

SEQ ID NO: 614 - RNA, 23 nt, synthetic construct
  source 1..23: mol_type = other RNA
  modified_base 3: mod_base = OTHER; note = 5'-methyluridine-3'-phosphate
  modified_base 9: mod_base = OTHER; note = 5'-methyluridine-3'-phosphate
  modified_base 11: mod_base = OTHER; note = 5'-methyluridine-3'-phosphate
  modified_base 19: mod_base = OTHER; note = 5'-methyluridine-3'-phosphate
gctgacggtgtccgaggatccag

SEQ ID NO: 615 - RNA, 23 nt, synthetic construct
  source 1..23: mol_type = other RNA
  modified_base 3: mod_base = OTHER; note = 5'-methyluridine-3'-phosphate
  modified_base 11: mod_base = OTHER; note = 5'-methyluridine-3'-phosphate
  modified_base 20: mod_base = OTHER; note = 5'-methyluridine-3'-phosphate
  modified_base 22: mod_base = OTHER; note = 5'-methyluridine-3'-phosphate
gatccagccgtgggaaacatctc

SEQ ID NO: 616 - RNA, 23 nt, synthetic construct
  source 1..23: mol_type = other RNA
  modified_base 2: mod_base = OTHER; note = 5'-methyluridine-3'-phosphate
  modified_base 11: mod_base = OTHER; note = 5'-methyluridine-3'-phosphate
  modified_base 13: mod_base = OTHER; note = 5'-methyluridine-3'-phosphate
  modified_base 19: mod_base = OTHER; note = 5'-methyluridine-3'-phosphate
  modified_base 20: mod_base = OTHER; note = 5'-methyluridine-3'-phosphate
  modified_base 22: mod_base = OTHER; note = 5'-methyluridine-3'-phosphate
gtgggaaacatctccagcttctg

SEQ ID NO: 617 - RNA, 23 nt, synthetic construct
  source 1..23: mol_type = other RNA
  modified_base 2: mod_base = OTHER; note = 5'-methyluridine-3'-phosphate
  modified_base 4: mod_base = OTHER; note = 5'-methyluridine-3'-phosphate
  modified_base 10: mod_base = OTHER; note = 5'-methyluridine-3'-phosphate
  modified_base 11: mod_base = OTHER; note = 5'-methyluridine-3'-phosphate
  modified_base 13: mod_base = OTHER; note = 5'-methyluridine-3'-phosphate
  modified_base 16: mod_base = OTHER; note = 5'-methyluridine-3'-phosphate
  modified_base 18: mod_base = OTHER; note = 5'-methyluridine-3'-phosphate
atctccagcttctgctatcgacc

SEQ ID NO: 618 - RNA, 23 nt, synthetic construct
  source 1..23: mol_type = other RNA
  modified_base 3: mod_base = OTHER; note = 5'-methyluridine-3'-phosphate
  modified_base 6: mod_base = OTHER; note = 5'-methyluridine-3'-phosphate
  modified_base 13: mod_base = OTHER; note = 5'-methyluridine-3'-phosphate
  modified_base 16: mod_base = OTHER; note = 5'-methyluridine-3'-phosphate
actcctaccacctgctccggcac

SEQ ID NO: 619 - RNA, 23 nt, synthetic construct
  source 1..23: mol_type = other RNA
  modified_base 3: mod_base = OTHER; note = 5'-methyluridine-3'-phosphate
  modified_base 9: mod_base = OTHER; note = 5'-methyluridine-3'-phosphate
  modified_base 15: mod_base = OTHER; note = 5'-methyluridine-3'-phosphate
  modified_base 18: mod_base = OTHER; note = 5'-methyluridine-3'-phosphate
  modified_base 20: mod_base = OTHER; note = 5'-methyluridine-3'-phosphate
cctcggactcacaatcgtctcgg

SEQ ID NO: 620 - RNA, 23 nt, synthetic construct
  source 1..23: mol_type = other RNA
  modified_base 2: mod_base = OTHER; note = 5'-methyluridine-3'-phosphate
  modified_base 4: mod_base = OTHER; note = 5'-methyluridine-3'-phosphate
  modified_base 10: mod_base = OTHER; note = 5'-methyluridine-3'-phosphate
  modified_base 13: mod_base = OTHER; note = 5'-methyluridine-3'-phosphate
  modified_base 16: mod_base = OTHER; note = 5'-methyluridine-3'-phosphate
  modified_base 19: mod_base = OTHER; note = 5'-methyluridine-3'-phosphate
gtctcgggctggtactggtgcag

SEQ ID NO: 621 - RNA, 23 nt, synthetic construct
  source 1..23: mol_type = other RNA
  modified_base 1: mod_base = OTHER; note = 5'-methyluridine-3'-phosphate
  modified_base 4: mod_base = OTHER; note = 5'-methyluridine-3'-phosphate
  modified_base 17: mod_base = OTHER; note = 5'-methyluridine-3'-phosphate
  modified_base 20: mod_base = OTHER; note = 5'-methyluridine-3'-phosphate
  modified_base 23: mod_base = OTHER; note = 5'-methyluridine
tggtgcagcgaccaggtcatcgt

SEQ ID NO: 622 - RNA, 23 nt, synthetic construct
  source 1..23: mol_type = other RNA
  modified_base 8: mod_base = OTHER; note = 5'-methyluridine-3'-phosphate
  modified_base 11: mod_base = OTHER; note = 5'-methyluridine-3'-phosphate
  modified_base 14: mod_base = OTHER; note = 5'-methyluridine-3'-phosphate
  modified_base 22: mod_base = OTHER; note = 5'-methyluridine-3'-phosphate
gaccaggtcatcgtgcagcgctg

SEQ ID NO: 623 - RNA, 23 nt, synthetic construct
  source 1..23: mol_type = other RNA
  modified_base 13: mod_base = OTHER; note = 5'-methyluridine-3'-phosphate
  modified_base 22: mod_base = OTHER; note = 5'-methyluridine-3'-phosphate
ccgggaagagcctgacccacatc

SEQ ID NO: 624 - RNA, 23 nt, synthetic construct
  source 1..23: mol_type = other RNA
  modified_base 2: mod_base = OTHER; note = 5'-methyluridine-3'-phosphate
  modified_base 11: mod_base = OTHER; note = 5'-methyluridine-3'-phosphate
  modified_base 22: mod_base = OTHER; note = 5'-methyluridine-3'-phosphate
ctgacccacatcaaggcgggctg

SEQ ID NO: 625 - RNA, 23 nt, synthetic construct
  source 1..23: mol_type = other RNA
  modified_base 5: mod_base = OTHER; note = 5'-methyluridine-3'-phosphate
  modified_base 9: mod_base = OTHER; note = 5'-methyluridine-3'-phosphate
  modified_base 12: mod_base = OTHER; note = 5'-methyluridine-3'-phosphate
  modified_base 14: mod_base = OTHER; note = 5'-methyluridine-3'-phosphate
  modified_base 16: mod_base = OTHER; note = 5'-methyluridine-3'-phosphate
  modified_base 20: mod_base = OTHER; note = 5'-methyluridine-3'-phosphate
gggctgcatcctgtgtgggtacc

SEQ ID NO: 626 - RNA, 23 nt, synthetic construct
  source 1..23: mol_type = other RNA
  modified_base 3: mod_base = OTHER; note = 5'-methyluridine-3'-phosphate
  modified_base 7: mod_base = OTHER; note = 5'-methyluridine-3'-phosphate
  modified_base 13: mod_base = OTHER; note = 5'-methyluridine-3'-phosphate
  modified_base 22: mod_base = OTHER; note = 5'-methyluridine-3'-phosphate
ggtacctgaagctgacgcccatg

SEQ ID NO: 627 - RNA, 23 nt, synthetic construct
  source 1..23: mol_type = other RNA
  modified_base 8: mod_base = OTHER; note = 5'-methyluridine-3'-phosphate
  modified_base 10: mod_base = OTHER; note = 5'-methyluridine-3'-phosphate
  modified_base 11: mod_base = OTHER; note = 5'-methyluridine-3'-phosphate
  modified_base 12: mod_base = OTHER; note = 5'-methyluridine-3'-phosphate
  modified_base 14: mod_base = OTHER; note = 5'-methyluridine-3'-phosphate
  modified_base 17: mod_base = OTHER; note = 5'-methyluridine-3'-phosphate
  modified_base 20: mod_base = OTHER; note = 5'-methyluridine-3'-phosphate
  modified_base 23: mod_base = OTHER; note = 5'-methyluridine
acgcccatgtttctcatggtcat

SEQ ID NO: 628 - RNA, 23 nt, synthetic construct
  source 1..23: mol_type = other RNA
  modified_base 1: mod_base = OTHER; note = 5'-methyluridine-3'-phosphate
  modified_base 4: mod_base = OTHER; note = 5'-methyluridine-3'-phosphate
  modified_base 7: mod_base = OTHER; note = 5'-methyluridine-3'-phosphate
  modified_base 16: mod_base = OTHER; note = 5'-methyluridine-3'-phosphate
  modified_base 19: mod_base = OTHER; note = 5'-methyluridine-3'-phosphate
tggtcatgccaggcatgatcagc

SEQ ID NO: 629 - RNA, 23 nt, synthetic construct
  source 1..23: mol_type = other RNA
  modified_base 7: mod_base = OTHER; note = 5'-methyluridine-3'-phosphate
  modified_base 10: mod_base = OTHER; note = 5'-methyluridine-3'-phosphate
  modified_base 19: mod_base = OTHER; note = 5'-methyluridine-3'-phosphate
  modified_base 20: mod_base = OTHER; note = 5'-methyluridine-3'-phosphate
  modified_base 22: mod_base = OTHER; note = 5'-methyluridine-3'-phosphate
caggcatgatcagccgcattctg

SEQ ID NO: 630 - RNA, 23 nt, synthetic construct
  source 1..23: mol_type = other RNA
  modified_base 1: mod_base = OTHER; note = 5'-methyluridine-3'-phosphate
  modified_base 10: mod_base = OTHER; note = 5'-methyluridine-3'-phosphate
  modified_base 11: mod_base = OTHER; note = 5'-methyluridine-3'-phosphate
  modified_base 13: mod_base = OTHER; note = 5'-methyluridine-3'-phosphate
  modified_base 15: mod_base = OTHER; note = 5'-methyluridine-3'-phosphate
tcagccgcattctgtacccagac

SEQ ID NO: 631 - RNA, 23 nt, synthetic construct
  source 1..23: mol_type = other RNA
  modified_base 2: mod_base = OTHER; note = 5'-methyluridine-3'-phosphate
  modified_base 4: mod_base = OTHER; note = 5'-methyluridine-3'-phosphate
  modified_base 17: mod_base = OTHER; note = 5'-methyluridine-3'-phosphate
  modified_base 22: mod_base = OTHER; note = 5'-methyluridine-3'-phosphate
ctgtacccagacgaggtggcgtg

SEQ ID NO: 632 - RNA, 23 nt, synthetic construct
  source 1..23: mol_type = other RNA
  modified_base 6: mod_base = OTHER; note = 5'-methyluridine-3'-phosphate
  modified_base 11: mod_base = OTHER; note = 5'-methyluridine-3'-phosphate
  modified_base 14: mod_base = OTHER; note = 5'-methyluridine-3'-phosphate
  modified_base 21: mod_base = OTHER; note = 5'-methyluridine-3'-phosphate
ggaggtgggctgctccaacatcg

SEQ ID NO: 633 - RNA, 23 nt, synthetic construct
  source 1..23: mol_type = other RNA
  modified_base 2: mod_base = OTHER; note = 5'-methyluridine-3'-phosphate
  modified_base 5: mod_base = OTHER; note = 5'-methyluridine-3'-phosphate
  modified_base 12: mod_base = OTHER; note = 5'-methyluridine-3'-phosphate
  modified_base 17: mod_base = OTHER; note = 5'-methyluridine-3'-phosphate
ctgctccaacatcgcctacccgc

SEQ ID NO: 634 - RNA, 23 nt, synthetic construct
  source 1..23: mol_type = other RNA
  modified_base 4: mod_base = OTHER; note = 5'-methyluridine-3'-phosphate
  modified_base 7: mod_base = OTHER; note = 5'-methyluridine-3'-phosphate
  modified_base 10: mod_base = OTHER; note = 5'-methyluridine-3'-phosphate
  modified_base 16: mod_base = OTHER; note = 5'-methyluridine-3'-phosphate
  modified_base 19: mod_base = OTHER; note = 5'-methyluridine-3'-phosphate
ggctcgtcgtgaagctcatgccc

SEQ ID NO: 635 - RNA, 23 nt, synthetic construct
  source 1..23: mol_type = other RNA
  modified_base 1: mod_base = OTHER; note = 5'-methyluridine-3'-phosphate
  modified_base 7: mod_base = OTHER; note = 5'-methyluridine-3'-phosphate
  modified_base 10: mod_base = OTHER; note = 5'-methyluridine-3'-phosphate
  modified_base 20: mod_base = OTHER; note = 5'-methyluridine-3'-phosphate
  modified_base 22: mod_base = OTHER; note = 5'-methyluridine-3'-phosphate
tgaagctcatgcccaacggtctg

SEQ ID NO: 636 - RNA, 23 nt, synthetic construct
  source 1..23: mol_type = other RNA
  modified_base 5: mod_base = OTHER; note = 5'-methyluridine-3'-phosphate
  modified_base 7: mod_base = OTHER; note = 5'-methyluridine-3'-phosphate
  modified_base 16: mod_base = OTHER; note = 5'-methyluridine-3'-phosphate
  modified_base 19: mod_base = OTHER; note = 5'-methyluridine-3'-phosphate
  modified_base 22: mod_base = OTHER; note = 5'-methyluridine-3'-phosphate
acggtctgcgcggactcatgctg

SEQ ID NO: 637 - RNA, 23 nt, synthetic construct
  source 1..23: mol_type = other RNA
  modified_base 7: mod_base = OTHER; note = 5'-methyluridine-3'-phosphate
  modified_base 10: mod_base = OTHER; note = 5'-methyluridine-3'-phosphate
  modified_base 13: mod_base = OTHER; note = 5'-methyluridine-3'-phosphate
  modified_base 19: mod_base = OTHER; note = 5'-methyluridine-3'-phosphate
  modified_base 22: mod_base = OTHER; note = 5'-methyluridine-3'-phosphate
gcggactcatgctggcggtcatg

SEQ ID NO: 638 - RNA, 23 nt, synthetic construct
  source 1..23: mol_type = other RNA
  modified_base 2: mod_base = OTHER; note = 5'-methyluridine-3'-phosphate
  modified_base 5: mod_base = OTHER; note = 5'-methyluridine-3'-phosphate
  modified_base 14: mod_base = OTHER; note = 5'-methyluridine-3'-phosphate
  modified_base 17: mod_base = OTHER; note = 5'-methyluridine-3'-phosphate
  modified_base 19: mod_base = OTHER; note = 5'-methyluridine-3'-phosphate
  modified_base 22: mod_base = OTHER; note = 5'-methyluridine-3'-phosphate
atgctggccgcgctcatgtcctc

SEQ ID NO: 639 - RNA, 23 nt, synthetic construct
  source 1..23: mol_type = other RNA
  modified_base 2: mod_base = OTHER; note = 5'-methyluridine-3'-phosphate
  modified_base 4: mod_base = OTHER; note = 5'-methyluridine-3'-phosphate
  modified_base 7: mod_base = OTHER; note = 5'-methyluridine-3'-phosphate
  modified_base 11: mod_base = OTHER; note = 5'-methyluridine-3'-phosphate
  modified_base 16: mod_base = OTHER; note = 5'-methyluridine-3'-phosphate
  modified_base 20: mod_base = OTHER; note = 5'-methyluridine-3'-phosphate
  modified_base 22: mod_base = OTHER; note = 5'-methyluridine-3'-phosphate
  modified_base 23: mod_base = OTHER; note = 5'-methyluridine
atgtcctcgctggcctccatctt

SEQ ID NO: 640 - RNA, 23 nt, synthetic construct
  source 1..23: mol_type = other RNA
  modified_base 2: mod_base = OTHER; note = 5'-methyluridine-3'-phosphate
  modified_base 7: mod_base = OTHER; note = 5'-methyluridine-3'-phosphate
  modified_base 11: mod_base = OTHER; note = 5'-methyluridine-3'-phosphate
  modified_base 13: mod_base = OTHER; note = 5'-methyluridine-3'-phosphate
  modified_base 14: mod_base = OTHER; note = 5'-methyluridine-3'-phosphate
ctggcctccatcttcaacagcag

SEQ ID NO: 641 - RNA, 23 nt, synthetic construct
  source 1..23: mol_type = other RNA
  modified_base 2: mod_base = OTHER; note = 5'-methyluridine-3'-phosphate
  modified_base 4: mod_base = OTHER; note = 5'-methyluridine-3'-phosphate
  modified_base 5: mod_base = OTHER; note = 5'-methyluridine-3'-phosphate
  modified_base 23: mod_base = OTHER; note = 5'-methyluridine
atcttcaacagcagcagcacgct

SEQ ID NO: 642 - RNA, 23 nt, synthetic construct
  source 1..23: mol_type = other RNA
  modified_base 14: mod_base = OTHER; note = 5'-methyluridine-3'-phosphate
  modified_base 16: mod_base = OTHER; note = 5'-methyluridine-3'-phosphate
  modified_base 17: mod_base = OTHER; note = 5'-methyluridine-3'-phosphate
  modified_base 23: mod_base = OTHER; note = 5'-methyluridine
agcagcagcacgctcttcaccat

SEQ ID NO: 643 - RNA, 23 nt, synthetic construct
  source 1..23: mol_type = other RNA
  modified_base 5: mod_base = OTHER; note = 5'-methyluridine-3'-phosphate
  modified_base 7: mod_base = OTHER; note = 5'-methyluridine-3'-phosphate
  modified_base 8: mod_base = OTHER; note = 5'-methyluridine-3'-phosphate
  modified_base 14: mod_base = OTHER; note = 5'-methyluridine-3'-phosphate
  modified_base 20: mod_base = OTHER; note = 5'-methyluridine-3'-phosphate
  modified_base 22: mod_base = OTHER; note = 5'-methyluridine-3'-phosphate
acgctcttcaccatggacatcta

SEQ ID NO: 644 - RNA, 23 nt, synthetic construct
  source 1..23: mol_type = other RNA
  modified_base 4: mod_base = OTHER; note = 5'-methyluridine-3'-phosphate
  modified_base 10: mod_base = OTHER; note = 5'-methyluridine-3'-phosphate
  modified_base 12: mod_base = OTHER; note = 5'-methyluridine-3'-phosphate
  modified_base 22: mod_base = OTHER; note = 5'-methyluridine-3'-phosphate
ccatggacatctacacgcgcctg

SEQ ID NO: 645 - RNA, 23 nt, synthetic construct
  source 1..23: mol_type = other RNA
  modified_base 5: mod_base = OTHER; note = 5'-methyluridine-3'-phosphate
  modified_base 7: mod_base = OTHER; note = 5'-methyluridine-3'-phosphate
  modified_base 11: mod_base = OTHER; note = 5'-methyluridine-3'-phosphate
  modified_base 14: mod_base = OTHER; note = 5'-methyluridine-3'-phosphate
  modified_base 16: mod_base = OTHER; note = 5'-methyluridine-3'-phosphate
  modified_base 17: mod_base = OTHER; note = 5'-methyluridine-3'-phosphate
  modified_base 20: mod_base = OTHER; note = 5'-methyluridine-3'-phosphate
  modified_base 23: mod_base = OTHER; note = 5'-methyluridine
cggctctgggtggtgttcatcgt

SEQ ID NO: 646 - RNA, 23 nt, synthetic construct
  source 1..23: mol_type = other RNA
  modified_base 2: mod_base = OTHER; note = 5'-methyluridine-3'-phosphate
  modified_base 5: mod_base = OTHER; note = 5'-methyluridine-3'-phosphate
  modified_base 7: mod_base = OTHER; note = 5'-methyluridine-3'-phosphate
  modified_base 8: mod_base = OTHER; note = 5'-methyluridine-3'-phosphate
  modified_base 11: mod_base = OTHER; note = 5'-methyluridine-3'-phosphate
  modified_base 14: mod_base = OTHER; note = 5'-methyluridine-3'-phosphate
  modified_base 17: mod_base = OTHER; note = 5'-methyluridine-3'-phosphate
  modified_base 20: mod_base = OTHER; note = 5'-methyluridine-3'-phosphate
  modified_base 22: mod_base = OTHER; note = 5'-methyluridine-3'-phosphate
gtggtgttcatcgtggtagtgtc

SEQ ID NO: 647 - RNA, 23 nt, synthetic construct
  source 1..23: mol_type = other RNA
  modified_base 2: mod_base = OTHER; note = 5'-methyluridine-3'-phosphate
  modified_base 5: mod_base = OTHER; note = 5'-methyluridine-3'-phosphate
  modified_base 8: mod_base = OTHER; note = 5'-methyluridine-3'-phosphate
  modified_base 11: mod_base = OTHER; note = 5'-methyluridine-3'-phosphate
  modified_base 13: mod_base = OTHER; note = 5'-methyluridine-3'-phosphate
  modified_base 17: mod_base = OTHER; note = 5'-methyluridine-3'-phosphate
  modified_base 22: mod_base = OTHER; note = 5'-methyluridine-3'-phosphate
atcgtggtagtgtcggtggcctg

SEQ ID NO: 648 - RNA, 23 nt, synthetic construct
  source 1..23: mol_type = other RNA
  modified_base 7: mod_base = OTHER; note = 5'-methyluridine-3'-phosphate
  modified_base 9: mod_base = OTHER; note = 5'-methyluridine-3'-phosphate
  modified_base 10: mod_base = OTHER; note = 5'-methyluridine-3'-phosphate
  modified_base 14: mod_base = OTHER; note = 5'-methyluridine-3'-phosphate
  modified_base 15: mod_base = OTHER; note = 5'-methyluridine-3'-phosphate
  modified_base 19: mod_base = OTHER; note = 5'-methyluridine-3'-phosphate
ggcagctcttcgattacatccag

SEQ ID NO: 649 - RNA, 23 nt, synthetic construct
  source 1..23: mol_type = other RNA
  modified_base 4: mod_base = OTHER; note = 5'-methyluridine-3'-phosphate
  modified_base 5: mod_base = OTHER; note = 5'-methyluridine-3'-phosphate
  modified_base 9: mod_base = OTHER; note = 5'-methyluridine-3'-phosphate
  modified_base 18: mod_base = OTHER; note = 5'-methyluridine-3'-phosphate
  modified_base 20: mod_base = OTHER; note = 5'-methyluridine-3'-phosphate
  modified_base 22: mod_base = OTHER; note = 5'-methyluridine-3'-phosphate
cgattacatccaggcagtctcta

SEQ ID NO: 650 - RNA, 23 nt, synthetic construct
  source 1..23: mol_type = other RNA
  modified_base 9: mod_base = OTHER; note = 5'-methyluridine-3'-phosphate
  modified_base 11: mod_base = OTHER; note = 5'-methyluridine-3'-phosphate
  modified_base 13: mod_base = OTHER; note = 5'-methyluridine-3'-phosphate
  modified_base 17: mod_base = OTHER; note = 5'-methyluridine-3'-phosphate
  modified_base 21: mod_base = OTHER; note = 5'-methyluridine-3'-phosphate
ccaggcagtctctagctacctgg

SEQ ID NO: 651 - RNA, 23 nt, synthetic construct
  source 1..23: mol_type = other RNA
  modified_base 1: mod_base = OTHER; note = 5'-methyluridine-3'-phosphate
  modified_base 3: mod_base = OTHER; note = 5'-methyluridine-3'-phosphate
  modified_base 4: mod_base = OTHER; note = 5'-methyluridine-3'-phosphate
  modified_base 7: mod_base = OTHER; note = 5'-methyluridine-3'-phosphate
  modified_base 10: mod_base = OTHER; note = 5'-methyluridine-3'-phosphate
  modified_base 16: mod_base = OTHER; note = 5'-methyluridine-3'-phosphate
  modified_base 18: mod_base = OTHER; note = 5'-methyluridine-3'-phosphate
  modified_base 19: mod_base = OTHER; note = 5'-methyluridine-3'-phosphate
  modified_base 22: mod_base = OTHER; note = 5'-methyluridine-3'-phosphate
tcttcgtgctggcgctcttcgtg

SEQ ID NO: 652 - RNA, 23 nt, synthetic construct
  source 1..23: mol_type = other RNA
  modified_base 3: mod_base = OTHER; note = 5'-methyluridine-3'-phosphate
  modified_base 12: mod_base = OTHER; note = 5'-methyluridine-3'-phosphate
  modified_base 13: mod_base = OTHER; note = 5'-methyluridine-3'-phosphate
  modified_base 16: mod_base = OTHER; note = 5'-methyluridine-3'-phosphate
cgtgccgcgcgttaatgagcagg

SEQ ID NO: 653 - RNA, 23 nt, synthetic construct
  source 1..23: mol_type = other RNA
  modified_base 2: mod_base = OTHER; note = 5'-methyluridine-3'-phosphate
  modified_base 8: mod_base = OTHER; note = 5'-methyluridine-3'-phosphate
  modified_base 17: mod_base = OTHER; note = 5'-methyluridine-3'-phosphate
  modified_base 20: mod_base = OTHER; note = 5'-methyluridine-3'-phosphate
  modified_base 21: mod_base = OTHER; note = 5'-methyluridine-3'-phosphate
atgggcctggcacgcctgattcc

SEQ ID NO: 654 - RNA, 23 nt, synthetic construct
  source 1..23: mol_type = other RNA
  modified_base 7: mod_base = OTHER; note = 5'-methyluridine-3'-phosphate
  modified_base 10: mod_base = OTHER; note = 5'-methyluridine-3'-phosphate
  modified_base 11: mod_base = OTHER; note = 5'-methyluridine-3'-phosphate
  modified_base 18: mod_base = OTHER; note = 5'-methyluridine-3'-phosphate
  modified_base 19: mod_base = OTHER; note = 5'-methyluridine-3'-phosphate
  modified_base 21: mod_base = OTHER; note = 5'-methyluridine-3'-phosphate
cacgcctgattcccgagttctcc

SEQ ID NO: 655 - RNA, 23 nt, synthetic construct
  source 1..23: mol_type = other RNA
  modified_base 1: mod_base = OTHER; note = 5'-methyluridine-3'-phosphate
  modified_base 2: mod_base = OTHER; note = 5'-methyluridine-3'-phosphate
  modified_base 9: mod_base = OTHER; note = 5'-methyluridine-3'-phosphate
  modified_base 10: mod_base = OTHER; note = 5'-methyluridine-3'-phosphate
  modified_base 12: mod_base = OTHER; note = 5'-methyluridine-3'-phosphate
  modified_base 15: mod_base = OTHER; note = 5'-methyluridine-3'-phosphate
  modified_base 16: mod_base = OTHER; note = 5'-methyluridine-3'-phosphate
  modified_base 21: mod_base = OTHER; note = 5'-methyluridine-3'-phosphate
ttcccgagttctccttcggctcg

SEQ ID NO: 656 - RNA, 23 nt, synthetic construct
  source 1..23: mol_type = other RNA
  modified_base 1: mod_base = OTHER; note = 5'-methyluridine-3'-phosphate
  modified_base 7: mod_base = OTHER; note = 5'-methyluridine-3'-phosphate
  modified_base 15: mod_base = OTHER; note = 5'-methyluridine-3'-phosphate
  modified_base 16: mod_base = OTHER; note = 5'-methyluridine-3'-phosphate
  modified_base 17: mod_base = OTHER; note = 5'-methyluridine-3'-phosphate
  modified_base 20: mod_base = OTHER; note = 5'-methyluridine-3'-phosphate
  modified_base 22: mod_base = OTHER; note = 5'-methyluridine-3'-phosphate
tcggcgtgcccagctttcctctg

SEQ ID NO: 657 - RNA, 23 nt, synthetic construct
  source 1..23: mol_type = other RNA
  modified_base 3: mod_base = OTHER; note = 5'-methyluridine-3'-phosphate
  modified_base 4: mod_base = OTHER; note = 5'-methyluridine-3'-phosphate
  modified_base 5: mod_base = OTHER; note = 5'-methyluridine-3'-phosphate
  modified_base 8: mod_base = OTHER; note = 5'-methyluridine-3'-phosphate
  modified_base 10: mod_base = OTHER; note = 5'-methyluridine-3'-phosphate
  modified_base 17: mod_base = OTHER; note = 5'-methyluridine-3'-phosphate
  modified_base 22: mod_base = OTHER; note = 5'-methyluridine-3'-phosphate
gctttcctctgcggcgtgcacta

SEQ ID NO: 658 - RNA, 23 nt, synthetic construct
  source 1..23: mol_type = other RNA
  modified_base 1: mod_base = OTHER; note = 5'-methyluridine-3'-phosphate
  modified_base 8: mod_base = OTHER; note = 5'-methyluridine-3'-phosphate
  modified_base 13: mod_base = OTHER; note = 5'-methyluridine-3'-phosphate
  modified_base 17: mod_base = OTHER; note = 5'-methyluridine-3'-phosphate
  modified_base 19: mod_base = OTHER; note = 5'-methyluridine-3'-phosphate
  modified_base 22: mod_base = OTHER; note = 5'-methyluridine-3'-phosphate
  modified_base 23: mod_base = OTHER; note = 5'-methyluridine
tgcggcgtgcactacctctactt

SEQ ID NO: 659 - RNA, 23 nt, synthetic construct
  source 1..23: mol_type = other RNA
  modified_base 4: mod_base = OTHER; note = 5'-methyluridine-3'-phosphate
  modified_base 8: mod_base = OTHER; note = 5'-methyluridine-3'-phosphate
  modified_base 10: mod_base = OTHER; note = 5'-methyluridine-3'-phosphate
  modified_base 13: mod_base = OTHER; note = 5'-methyluridine-3'-phosphate
  modified_base 14: mod_base = OTHER; note = 5'-methyluridine-3'-phosphate
  modified_base 20: mod_base = OTHER; note = 5'-methyluridine-3'-phosphate
  modified_base 21: mod_base = OTHER; note = 5'-methyluridine-3'-phosphate
  modified_base 23: mod_base = OTHER; note = 5'-methyluridine
cactacctctacttcgccattgt

SEQ ID NO: 660 - RNA, 23 nt, synthetic construct
  source 1..23: mol_type = other RNA
  modified_base 1: mod_base = OTHER; note = 5'-methyluridine-3'-phosphate
  modified_base 7: mod_base = OTHER; note = 5'-methyluridine-3'-phosphate
  modified_base 8: mod_base = OTHER; note = 5'-methyluridine-3'-phosphate
  modified_base 10: mod_base = OTHER; note = 5'-methyluridine-3'-phosphate
  modified_base 13: mod_base = OTHER; note = 5'-methyluridine-3'-phosphate
  modified_base 15: mod_base = OTHER; note = 5'-methyluridine-3'-phosphate
  modified_base 16: mod_base = OTHER; note = 5'-methyluridine-3'-phosphate
  modified_base 18: mod_base = OTHER; note = 5'-methyluridine-3'-phosphate
  modified_base 19: mod_base = OTHER; note = 5'-methyluridine-3'-phosphate
  modified_base 21: mod_base = OTHER; note = 5'-methyluridine-3'-phosphate
tcgccattgtgctgttcttctgc

SEQ ID NO: 661 - RNA, 23 nt, synthetic construct
  source 1..23: mol_type = other RNA
  modified_base 1: mod_base = OTHER; note = 5'-methyluridine-3'-phosphate
  modified_base 4: mod_base = OTHER; note = 5'-methyluridine-3'-phosphate
  modified_base 6: mod_base = OTHER; note = 5'-methyluridine-3'-phosphate
  modified_base 7: mod_base = OTHER; note = 5'-methyluridine-3'-phosphate
  modified_base 9: mod_base = OTHER; note = 5'-methyluridine-3'-phosphate
  modified_base 10: mod_base = OTHER; note = 5'-methyluridine-3'-phosphate
  modified_base 12: mod_base = OTHER; note = 5'-methyluridine-3'-phosphate
  modified_base 15: mod_base = OTHER; note = 5'-methyluridine-3'-phosphate
  modified_base 17: mod_base = OTHER; note = 5'-methyluridine-3'-phosphate
  modified_base 22: mod_base = OTHER; note = 5'-methyluridine-3'-phosphate
tgctgttcttctgctctggcctc

SEQ ID NO: 662 - RNA, 23 nt, synthetic construct
  source 1..23: mol_type = other RNA
  modified_base 1: mod_base = OTHER; note = 5'-methyluridine-3'-phosphate
  modified_base 4: mod_base = OTHER; note = 5'-methyluridine-3'-phosphate
  modified_base 6: mod_base = OTHER; note = 5'-methyluridine-3'-phosphate
  modified_base 11: mod_base = OTHER; note = 5'-methyluridine-3'-phosphate
  modified_base 14: mod_base = OTHER; note = 5'-methyluridine-3'-phosphate
  modified_base 20: mod_base = OTHER; note = 5'-methyluridine-3'-phosphate
tgctctggcctcctcaccctcac

SEQ ID NO: 663 - RNA, 23 nt, synthetic construct
  source 1..23: mol_type = other RNA
  modified_base 1: mod_base = OTHER; note = 5'-methyluridine-3'-phosphate
  modified_base 4: mod_base = OTHER; note = 5'-methyluridine-3'-phosphate
  modified_base 10: mod_base = OTHER; note = 5'-methyluridine-3'-phosphate
  modified_base 16: mod_base = OTHER; note = 5'-methyluridine-3'-phosphate
  modified_base 18: mod_base = OTHER; note = 5'-methyluridine-3'-phosphate
  modified_base 22: mod_base = OTHER; note = 5'-methyluridine-3'-phosphate
tcctcaccctcacggtctccctg

SEQ ID NO: 664 - RNA, 23 nt, synthetic construct
  source 1..23: mol_type = other RNA
  modified_base 7: mod_base = OTHER; note = 5'-methyluridine-3'-phosphate
  modified_base 16: mod_base = OTHER; note = 5'-methyluridine-3'-phosphate
  modified_base 19: mod_base = OTHER; note = 5'-methyluridine-3'-phosphate
  modified_base 21: mod_base = OTHER; note = 5'-methyluridine-3'-phosphate
  modified_base 22: mod_base = OTHER; note = 5'-methyluridine-3'-phosphate
agcacctccaccgcctggtcttc

SEQ ID NO: 665 - RNA, 23 nt, synthetic construct
  source 1..23: mol_type = other RNA
  modified_base 7: mod_base = OTHER; note = 5'-methyluridine-3'-phosphate
  modified_base 10: mod_base = OTHER; note = 5'-methyluridine-3'-phosphate
  modified_base 12: mod_base = OTHER; note = 5'-methyluridine-3'-phosphate
  modified_base 13: mod_base = OTHER; note = 5'-methyluridine-3'-phosphate
  modified_base 17: mod_base = OTHER; note = 5'-methyluridine-3'-phosphate
  modified_base 19: mod_base = OTHER; note = 5'-methyluridine-3'-phosphate
accgcctggtcttcagtctccgg

SEQ ID NO: 666 - RNA, 23 nt, synthetic construct
  source 1..23: mol_type = other RNA
  modified_base 1: mod_base = OTHER; note = 5'-methyluridine-3'-phosphate
  modified_base 3: mod_base = OTHER; note = 5'-methyluridine-3'-phosphate
  modified_base 10: mod_base = OTHER; note = 5'-methyluridine-3'-phosphate
tctccggcatagcaaggaggaac

SEQ ID NO: 667 - RNA, 23 nt, synthetic construct
  source 1..23: mol_type = other RNA
  modified_base 22: mod_base = OTHER; note = 5'-methyluridine-3'-phosphate
gcaaggaggaacgggaggacctg

SEQ ID NO: 668 - RNA, 23 nt, synthetic construct
  source 1..23: mol_type = other RNA
  modified_base 13: mod_base = OTHER; note = 5'-methyluridine-3'-phosphate
  modified_base 17: mod_base = OTHER; note = 5'-methyluridine-3'-phosphate
  modified_base 20: mod_base = OTHER; note = 5'-methyluridine-3'-phosphate
  modified_base 23: mod_base = OTHER; note = 5'-methyluridine
aacgggaggacctggatgctgat

SEQ ID NO: 669 - RNA, 23 nt, synthetic construct
  source 1..23: mol_type = other RNA
  modified_base 4: mod_base = OTHER; note = 5'-methyluridine-3'-phosphate
  modified_base 8: mod_base = OTHER; note = 5'-methyluridine-3'-phosphate
  modified_base 11: mod_base = OTHER; note = 5'-methyluridine-3'-phosphate
  modified_base 14: mod_base = OTHER; note = 5'-methyluridine-3'-phosphate
acctggatgctgatgagcagcaa

SEQ ID NO: 670 - RNA, 23 nt, synthetic construct
  source 1..23: mol_type = other RNA
  modified_base 2: mod_base = OTHER; note = 5'-methyluridine-3'-phosphate
  modified_base 5: mod_base = OTHER; note = 5'-methyluridine-3'-phosphate
  modified_base 18: mod_base = OTHER; note = 5'-methyluridine-3'-phosphate
  modified_base 21: mod_base = OTHER; note = 5'-methyluridine-3'-phosphate
ctgatgagcagcaaggctcctca

SEQ ID NO: 671 - RNA, 23 nt, synthetic construct
  source 1..23: mol_type = other RNA
  modified_base 9: mod_base = OTHER; note = 5'-methyluridine-3'-phosphate
  modified_base 12: mod_base = OTHER; note = 5'-methyluridine-3'-phosphate
  modified_base 16: mod_base = OTHER; note = 5'-methyluridine-3'-phosphate
  modified_base 20: mod_base = OTHER; note = 5'-methyluridine-3'-phosphate
  modified_base 22: mod_base = OTHER; note = 5'-methyluridine-3'-phosphate
agcaaggctcctcactccctgta

SEQ ID NO: 672 - RNA, 23 nt, synthetic construct
  source 1..23: mol_type = other RNA
  modified_base 4: mod_base = OTHER; note = 5'-methyluridine-3'-phosphate
  modified_base 8: mod_base = OTHER; note = 5'-methyluridine-3'-phosphate
  modified_base 10: mod_base = OTHER; note = 5'-methyluridine-3'-phosphate
  modified_base 17: mod_base = OTHER; note = 5'-methyluridine-3'-phosphate
  modified_base 21: mod_base = OTHER; note = 5'-methyluridine-3'-phosphate
cactccctgtacagaatgggtgc

SEQ ID NO: 673 - RNA, 23 nt, synthetic construct
  source 1..23: mol_type = other RNA
  modified_base 3: mod_base = OTHER; note = 5'-methyluridine-3'-phosphate
  modified_base 14: mod_base = OTHER; note = 5'-methyluridine-3'-phosphate
  modified_base 19: mod_base = OTHER; note = 5'-methyluridine-3'-phosphate
ggtgcccagagagtgccatggag

SEQ ID NO: 674 - RNA, 23 nt, synthetic construct
  source 1..23: mol_type = other RNA
  modified_base 2: mod_base = OTHER; note = 5'-methyluridine-3'-phosphate
  modified_base 7: mod_base = OTHER; note = 5'-methyluridine-3'-phosphate
  modified_base 13: mod_base = OTHER; note = 5'-methyluridine-3'-phosphate
  modified_base 17: mod_base = OTHER; note = 5'-methyluridine-3'-phosphate
gtgccatggagatgaatgagccc

SEQ ID NO: 675 - RNA, 23 nt, synthetic construct
  source 1..23: mol_type = other RNA
  modified_base 11: mod_base = OTHER; note = 5'-methyluridine-3'-phosphate
  modified_base 13: mod_base = OTHER; note = 5'-methyluridine-3'-phosphate
  modified_base 14: mod_base = OTHER; note = 5'-methyluridine-3'-phosphate
  modified_base 22: mod_base = OTHER; note = 5'-methyluridine-3'-phosphate
gcaccaagcctcttccgccagtg

SEQ ID NO: 676 - RNA, 23 nt, synthetic construct
  source 1..23: mol_type = other RNA
  modified_base 6: mod_base = OTHER; note = 5'-methyluridine-3'-phosphate
  modified_base 10: mod_base = OTHER; note = 5'-methyluridine-3'-phosphate
  modified_base 13: mod_base = OTHER; note = 5'-methyluridine-3'-phosphate
  modified_base 15: mod_base = OTHER; note = 5'-methyluridine-3'-phosphate
  modified_base 18: mod_base = OTHER; note = 5'-methyluridine-3'-phosphate
  modified_base 19: mod_base = OTHER; note = 5'-methyluridine-3'-phosphate
  modified_base 20: mod_base = OTHER; note = 5'-methyluridine-3'-phosphate
  modified_base 21: mod_base = OTHER; note = 5'-methyluridine-3'-phosphate
  modified_base 23: mod_base = OTHER; note = 5'-methyluridine
gccagtgcctgctctggttttgt

SEQ ID NO: 677 - RNA, 23 nt, synthetic construct
  source 1..23: mol_type = other RNA
  modified_base 2: mod_base = OTHER; note = 5'-methyluridine-3'-phosphate
  modified_base 4: mod_base = OTHER; note = 5'-methyluridine-3'-phosphate
  modified_base 7: mod_base = OTHER; note = 5'-methyluridine-3'-phosphate
  modified_base 8: mod_base = OTHER; note = 5'-methyluridine-3'-phosphate
  modified_base 9: mod_base = OTHER; note = 5'-methyluridine-3'-phosphate
  modified_base 10: mod_base = OTHER; note = 5'-methyluridine-3'-phosphate
  modified_base 12: mod_base = OTHER; note = 5'-methyluridine-3'-phosphate
  modified_base 17: mod_base = OTHER; note = 5'-methyluridine-3'-phosphate
ctctggttttgtggaatgagcag

SEQ ID NO: 678 - RNA, 23 nt, synthetic construct
  source 1..23: mol_type = other RNA
  modified_base 4: mod_base = OTHER; note = 5'-methyluridine-3'-phosphate
  modified_base 13: mod_base = OTHER; note = 5'-methyluridine-3'-phosphate
ggctggaggacatcagcgaggac

SEQ ID NO: 679 - RNA, 23 nt, synthetic construct
  source 1..23: mol_type = other RNA
  modified_base 4: mod_base = OTHER; note = 5'-methyluridine-3'-phosphate
  modified_base 21: mod_base = OTHER; note = 5'-methyluridine-3'-phosphate
acatcagcgaggacccgagctgg

SEQ ID NO: 680 - RNA, 23 nt, synthetic construct
  source 1..23: mol_type = other RNA
  modified_base 5: mod_base = OTHER; note = 5'-methyluridine-3'-phosphate
  modified_base 7: mod_base = OTHER; note = 5'-methyluridine-3'-phosphate
  modified_base 10: mod_base = OTHER; note = 5'-methyluridine-3'-phosphate
  modified_base 16: mod_base = OTHER; note = 5'-methyluridine-3'-phosphate
  modified_base 20: mod_base = OTHER; note = 5'-methyluridine-3'-phosphate
cccgtgtggtcaacctcaatgcc

SEQ ID NO: 681 - RNA, 23 nt, synthetic construct
  source 1..23: mol_type = other RNA
  modified_base 1: mod_base = OTHER; note = 5'-methyluridine-3'-phosphate
  modified_base 7: mod_base = OTHER; note = 5'-methyluridine-3'-phosphate
  modified_base 11: mod_base = OTHER; note = 5'-methyluridine-3'-phosphate
  modified_base 16: mod_base = OTHER; note = 5'-methyluridine-3'-phosphate
  modified_base 19: mod_base = OTHER; note = 5'-methyluridine-3'-phosphate
  modified_base 22: mod_base = OTHER; note = 5'-methyluridine-3'-phosphate
tcaacctcaatgccctgctcatg

SEQ ID NO: 682 - RNA, 23 nt, synthetic construct
  source 1..23: mol_type = other RNA
  modified_base 5: mod_base = OTHER; note = 5'-methyluridine-3'-phosphate
  modified_base 8: mod_base = OTHER; note = 5'-methyluridine-3'-phosphate
  modified_base 11: mod_base = OTHER; note = 5'-methyluridine-3'-phosphate
  modified_base 14: mod_base = OTHER; note = 5'-methyluridine-3'-phosphate
  modified_base 20: mod_base = OTHER; note = 5'-methyluridine-3'-phosphate
gccctgctcatgatggcagtggc

SEQ ID NO: 683 - RNA, 23 nt, synthetic construct
  source 1..23: mol_type = other RNA
  modified_base 1: mod_base = OTHER; note = 5'-methyluridine-3'-phosphate
  modified_base 7: mod_base = OTHER; note = 5'-methyluridine-3'-phosphate
  modified_base 13: mod_base = OTHER; note = 5'-methyluridine-3'-phosphate
  modified_base 15: mod_base = OTHER; note = 5'-methyluridine-3'-phosphate
  modified_base 16: mod_base = OTHER; note = 5'-methyluridine-3'-phosphate
  modified_base 19: mod_base = OTHER; note = 5'-methyluridine-3'-phosphate
  modified_base 21: mod_base = OTHER; note = 5'-methyluridine-3'-phosphate
tggcagtggccgtgttcctctgg

SEQ ID NO: 684 - RNA, 23 nt, synthetic construct
  source 1..23: mol_type = other RNA
  modified_base 2: mod_base = OTHER; note = 5'-methyluridine-3'-phosphate
  modified_base 3: mod_base = OTHER; note = 5'-methyluridine-3'-phosphate
  modified_base 5: mod_base = OTHER; note = 5'-methyluridine-3'-phosphate
  modified_base 7: mod_base = OTHER; note = 5'-methyluridine-3'-phosphate
  modified_base 11: mod_base = OTHER; note = 5'-methyluridine-3'-phosphate
  modified_base 21: mod_base = OTHER; note = 5'-methyluridine-3'-phosphate
cttctatgcctaagaccaactgc

SEQ ID NO: 685 - RNA, 23 nt, synthetic construct
  source 1..23: mol_type = other RNA
  modified_base 2: mod_base = OTHER; note = 5'-methyluridine-3'-phosphate
  modified_base 12: mod_base = OTHER; note = 5'-methyluridine-3'-phosphate
  modified_base 16: mod_base = OTHER; note = 5'-methyluridine-3'-phosphate
  modified_base 17: mod_base = OTHER; note = 5'-methyluridine-3'-phosphate
ctaagaccaactgcgttggacac

SEQ ID NO: 686 - RNA, 23 nt, synthetic construct
  source 1..23: mol_type = other RNA
  modified_base 2: mod_base = OTHER; note = 5'-methyluridine-3'-phosphate
  modified_base 6: mod_base = OTHER; note = 5'-methyluridine-3'-phosphate
  modified_base 7: mod_base = OTHER; note = 5'-methyluridine-3'-phosphate
  modified_base 16: mod_base = OTHER; note = 5'-methyluridine-3'-phosphate
ctgcgttggacaccataagccac

SEQ ID NO: 687 - RNA, 23 nt, synthetic construct
  source 1..23: mol_type = other RNA
  modified_base 11: mod_base = OTHER; note = 5'-methyluridine-3'-phosphate
  modified_base 21: mod_base = OTHER; note = 5'-methyluridine-3'-phosphate
agccacagcctcacaggaagtgg

SEQ ID NO: 688 - RNA, 23 nt, synthetic construct
  source 1..23: mol_type = other RNA
  modified_base 1: mod_base = OTHER; note = 5'-methyluridine-3'-phosphate
  modified_base 2: mod_base = OTHER; note = 5'-methyluridine-3'-phosphate
  modified_base 4: mod_base = OTHER; note = 5'-methyluridine-3'-phosphate
  modified_base 12: mod_base = OTHER; note = 5'-methyluridine-3'-phosphate
  modified_base 13: mod_base = OTHER; note = 5'-methyluridine-3'-phosphate
  modified_base 16: mod_base = OTHER; note = 5'-methyluridine-3'-phosphate
  modified_base 18: mod_base = OTHER; note = 5'-methyluridine-3'-phosphate
  modified_base 22: mod_base = OTHER; note = 5'-methyluridine-3'-phosphate
ttctcccggccttcctctgcctg

SEQ ID NO: 689 - RNA, 23 nt, synthetic construct
  source 1..23: mol_type = other RNA
  modified_base 7: mod_base = OTHER; note = 5'-methyluridine-3'-phosphate
  modified_base 11: mod_base = OTHER; note = 5'-methyluridine-3'-phosphate
  modified_base 13: mod_base = OTHER; note = 5'-methyluridine-3'-phosphate
  modified_base 16: mod_base = OTHER; note = 5'-methyluridine-3'-phosphate
  modified_base 17: mod_base = OTHER; note = 5'-methyluridine-3'-phosphate
  modified_base 23: mod_base = OTHER; note = 5'-methyluridine
gcccactgcatctgattggcagt

SEQ ID NO: 690 - RNA, 23 nt, synthetic construct
  source 1..23: mol_type = other RNA
  modified_base 1: mod_base = OTHER; note = 5'-methyluridine-3'-phosphate
  modified_base 7: mod_base = OTHER; note = 5'-methyluridine-3'-phosphate
  modified_base 11: mod_base = OTHER; note = 5'-methyluridine-3'-phosphate
  modified_base 12: mod_base = OTHER; note = 5'-methyluridine-3'-phosphate
  modified_base 17: mod_base = OTHER; note = 5'-methyluridine-3'-phosphate
tggcagtcacttcccatgagggc

SEQ ID NO: 691 - RNA, 23 nt, synthetic construct
  source 1..23: mol_type = other RNA
  modified_base 4: mod_base = OTHER; note = 5'-methyluridine-3'-phosphate
  modified_base 9: mod_base = OTHER; note = 5'-methyluridine-3'-phosphate
  modified_base 10: mod_base = OTHER; note = 5'-methyluridine-3'-phosphate
  modified_base 15: mod_base = OTHER; note = 5'-methyluridine-3'-phosphate
cgctgcagttgccctaaggaaaa

1. A double stranded ribonucleic acid (dsRNA) agent for inhibiting expression of sodium-glucose cotransporter-2 (SGLT2) in a cell,
wherein the dsRNA agent comprises a sense strand and an antisense strand forming a double stranded region, wherein the sense strand comprises at least 15 contiguous nucleotides differing by no more than 3 nucleotides from the nucleotide sequence of SEQ ID NO:1, and said antisense strand comprises at least 15 contiguous nucleotides differing by no more than 3 nucleotides from the nucleotide sequence of SEQ ID NO: 6, and
wherein the sense strand or the antisense strand is conjugated to one or more lipophilic moieties.

2. The dsRNA agent of claim 1, wherein the antisense strand comprises at least 15 contiguous nucleotides differing by no more than 3 nucleotides from any one of the antisense nucleotide sequences in any one of Tables 2-3.

3.-8. (canceled)

9. The dsRNA agent of claim 1, wherein at least one nucleotide comprises a nucleotide modification.

10. (canceled)

11. (canceled)

12. The dsRNA agent of claim 9, wherein at least one of the nucleotide modifications is selected from the group a deoxy-nucleotide modification, a 3′-terminal deoxythimidine (dT) nucleotide modification, a 2′-O-methyl nucleotide modification, a 2′-fluoro modified nucleotide modification, a 2′-deoxy-nucleotide modification, a 2′-5′-linked ribonucleotide (3′-RNA) modification, a locked nucleotide modification, an unlocked nucleotide modification, a conformationally restricted nucleotide modification, a constrained ethyl nucleotide modification, an abasic nucleotide modification, a 2′-amino-nucleotide modification, a 2′-O-allyl-nucleotide modification, 2′ -C-alkyl-nucleotide modification, a 2′-methoxyethyl nucleotide modification, a 2′-O-alkyl-nucleotide modification, a morpholino nucleotide modification, a phosphoramidate modification, a non-natural base comprising nucleotide modification, a tetrahydropyran nucleotide modification, a 1,5-anhydrohexitol nucleotide modification, a cyclohexenyl nucleotide modification, a nucleotide comprising a 5′-phosphorothioate group modification, a nucleotide comprising a 5′-methylphosphonate group modification, a nucleotide comprising a 5′ phosphate or 5′ phosphate mimic modification, a nucleotide comprising vinyl phosphonate modification, a glycol nucleic acid (GNA) modification, a glycol nucleic acid S-Isomer (S-GNA) modification, a nucleotide comprising 2-hydroxymethyl-tetrahydrofuran-5-phosphate modification, a nucleotide comprising 2′-deoxythymidine-3′phosphate modification, a nucleotide comprising 2′-deoxyguanosine-3′-phosphate modification, and a terminal nucleotide linked to a cholesteryl derivative and a dodecanoic acid bisdecylamide group modification; and combinations thereof.

13.-15. (canceled)

16. The dsRNA agent of claim 12, further comprising at least one phosphorothioate internucleotide linkage.

17. (canceled)

18. The dsRNA agent of claim 1, wherein cach strand is independently no more than 30 nucleotides in length.

19. The dsRNA agent of claim 1, wherein at least one strand comprises a 3′ overhang of at least 1 nucleotide.

20.-29. (canceled)

30. The dsRNA agent of claim 1, wherein one or more lipophilic moieties are conjugated to one or more internal positions on at least one strand.

31.-39. (canceled)

40. The dsRNA agent of claim 1, wherein the one or more lipophilic moieties are conjugated to one or more of the internal positions selected from the group consisting of positions 4-8 and 13-18 on the sense strand, and positions 6-10 and 15-18 on the antisense strand, counting from the 5′-end of each strand.

41.-50. (canceled)

51. The dsRNA agent of claim 1, wherein the lipophilic moiety contains a saturated or unsaturated C6-C18 hydrocarbon chain.

52. (canceled)

53. (canceled)

54. The dsRNA agent of claim 1, wherein the lipophilic moiety is conjugated via a carrier that replaces one or more nucleotide(s) in the internal position(s) or the double stranded region.

55. (canceled)

56. (canceled)

57. The dsRNA agent of claim 1, wherein the lipophilic moiety is conjugated to a nucleobase, sugar moiety, or internucleosidic linkage.

58.-66. (canceled)

67. The dsRNA agent of claim 1, further comprising a phosphate or phosphate mimic at the 5′-end of the antisense strand.

68.-70. (canceled)

71. A cell containing the dsRNA agent of claim 1.

72. A pharmaceutical composition for inhibiting expression of a SGLT2 gene, comprising the dsRNA agent of claim 1.

73. (canceled)

74. A method of inhibiting expression of a SGLT2 gene in a cell, the method comprising:
(a) contacting the cell with the dsRNA agent of claim 1; and
(b) maintaining the cell produced in step (a) for a time sufficient to obtain degradation of the SGLT2 gene, thereby inhibiting expression of the SGLT2 gene in the cell.

75.-77. (canceled)

78. A method of treating a subject having a disorder that would benefit from reduction in sodium-glucose cotransporter-2 (SGLT2) expression, comprising administering to the subject a therapeutically effective amount of the dsRNA agent of claim 1, thereby treating the subject having the disorder that would benefit from reduction in SGLT2 expression.

79. (canceled)

80. The method of claim 78, wherein the disorder is a SGLT2-associated disorder.

81. The method of claim 80, wherein the SGLT2 -associated disorder is gout; or diabetes.

82.-93. (canceled)

94. A kit, a vial, or a syringe comprising the dsRNA agent of any one of claim 1.

95.-97. (canceled)
